(19) United States
(12) Patent Application Publication
(10) Pub. No.: US 2016/0083743 A1
(43) Pub. Date: Mar. 24, 2016

(54) PLANTS HAVING ENHANCED YIELD-RELATED TRAITS AND A METHOD FOR MAKING THE SAME

(71) Applicant: BASF Plant Science Company GmbH, Ludwigshafen (DE)

(72) Inventors: Ana Isabel Sanz Molinero, Madrid (ES); Yves Hatzfeld, Lille (FR); Valerie Frankard, Waterloo (BE); Christophe Reuzeau, Tocan Saint Apre (FR)

(21) Appl. No.: 14/840,153

(22) Filed: Aug. 31, 2015

Related U.S. Application Data
(62) Division of application No. 13/390,563, filed on Feb. 15, 2012, now abandoned.
(60) Provisional application No. 61/251,309, filed on Oct. 14, 2009.
(60) Provisional application No. 61/251,311, filed on Oct. 14, 2009.
(60) Provisional application No. 61/251,307, filed on Oct. 14, 2009.
(60) Provisional application No. 61/251,308, filed on Oct. 14, 2009.
(60) Provisional application No. 61/251,312, filed on Oct. 14, 2009.
(60) Provisional application No. 61/251,306, filed on Oct. 14, 2009.

(30) Foreign Application Priority Data
Aug. 19, 2009 (EP) 09168159.3
Aug. 19, 2009 (EP) 09168166.8
Aug. 19, 2009 (EP) 09168213.8
Aug. 21, 2009 (EP) 09168392.0
Aug. 21, 2009 (EP) 09168402.7
Aug. 21, 2009 (EP) 09168433.2

(51) Int. Cl. C12N 15/82

(52) U.S. Cl. CPC C12N 15/8261

(57) ABSTRACT

The present invention relates generally to the field of molecular biology and concerns a method for enhancing yield-related traits in plants by modulating expression in a plant of a nucleic acid encoding a FSM1-like (Fruit Sant/Myb) polypeptide, or a PIF3-like (PHYTOCHROME INTERACTING FACTOR) polypeptide, or an Uroporphyrinogen III decarboxylase (UROD) polypeptide, or an AS-MTT (Abiotic Stress Membrane Tethered Transcription factor) polypeptide, or an EXO-1 polypeptide, or a YiAP2 (Yield increasing Apetala 2) polypeptide. The present invention also concerns plants having modulated expression of a nucleic acid encoding a FSM1-like polypeptide, which plants have enhanced yield-related traits relative to corresponding wild type plants or other control plants. The invention also provides constructs useful in the methods of the invention.

### RELATED APPLICATIONS

[0001] This application is a divisional application of U.S. application Ser. No. 13/390,563 filed Feburary 15, 2012, which is a national stage application (under 35 U.S.C. §371) of PCT/EP2010/061657, filed Aug. 11, 2010, which claims benefit of European application 09168166.8, filed Aug. 19, 2009, European application 09168159.3, filed Aug. 19, 2009, European application 09168213.8, filed Aug. 19, 2009, European application 09168392.0, filed Aug. 21, 2009, European application 09168433.2, filed Aug. 21, 2009, European application 09168402.7, filed Aug. 21, 2009, U.S. Provisional Application 61/251,309, filed Oct. 14, 2009, U.S. Provisional Application 61/251,307, filed Oct. 14, 2009, U.S. Provisional Application 61/251,308, filed Oct. 14, 2009, U.S. Provisional Application 61/251,312, filed Oct. 14, 2009, U.S. Provisional Application 61/251,306, filed Oct. 14, 2009, and U.S. Provisional Application 61/251,311, filed Oct. 14, 2009. The entire contents of each of these applications are hereby incorporated by reference herein in their entirety.

### SUBMISSION OF SEQUENCE LISTING

[0002] The Sequence Listing associated with this application is filed in electronic format via EFS-Web and hereby incorporated by reference into the specification in its entirety. The name of the text file containing the Sequence Listing is Sequence_Listing_074021_0169_01. The size of the text file is 1,737 KB, and the text file was created on Aug. 28, 2015.

[0003] The present invention relates generally to the field of molecular biology and concerns a method for enhancing yield-related traits in plants by modulating expression in a plant of a nucleic acid encoding a FSM1-like (Fruit Sant/Myb) polypeptide. The present invention also concerns plants having modulated expression of a nucleic acid encoding a FSM1-like polypeptide, which plants have enhanced yield-related traits relative to corresponding wild type plants or other control plants. The invention also provides constructs useful in the methods of the invention.

[0004] The present invention relates generally to the field of molecular biology and concerns a method for enhancing yield-related traits in plants by modulating expression in a plant of a nucleic acid encoding a PIF3-like (PHYTOCHROME INTERACTING FACTOR) polypeptide. The present invention also concerns plants having modulated expression of a nucleic acid encoding a PIF3-like polypeptide, which plants have enhanced yield-related traits relative to corresponding wild type plants or other control plants. The invention also provides constructs useful in the methods of the invention.

[0005] The present invention relates generally to the field of molecular biology and concerns a method for enhancing yield-related traits in plants by modulating expression in a plant of a nucleic acid encoding an Uroporphyrinogen III decarboxylase (UROD) polypeptide. The present invention also concerns plants having modulated expression of a nucleic acid encoding a UROD polypeptide, which plants have enhanced yield-related traits relative to corresponding wild type plants or other control plants. The invention also provides constructs useful in the methods of the invention.

[0006] The present invention relates generally to the field of molecular biology and concerns a method for enhancing various economically important yield-related traits in plants. More specifically, the present invention concerns a method for enhancing yield-related traits in plants by modulating expression in a plant of a nucleic acid encoding an AS-MTT (Abiotic Stress Membrane Tethered Transcription factor) polypeptide. The present invention also concerns plants having modulated expression of a nucleic acid encoding an AS-MTT polypeptide, which plants have enhanced yield-related traits relative to control plants. The invention also provides constructs comprising AS-MTT-encoding nucleic acids, useful in performing the methods of the invention.

[0007] The present invention relates generally to the field of molecular biology and concerns a method for enhancing yield-related traits in plants by modulating expression in a plant of a nucleic acid encoding an EXO-1 polypeptide. The present invention also concerns plants having modulated expression of a nucleic acid encoding an EXO-1 polypeptide, which plants have enhanced yield-related traits relative to corresponding wild type plants or other control plants. The invention also provides constructs useful in the methods of the invention.

[0008] The present invention relates generally to the field of molecular biology and concerns a method for enhancing yield-related traits in plants by modulating expression in a plant of a nucleic acid encoding a YiAP2 (Yield increasing Apetala 2) polypeptide. The present invention also concerns plants having modulated expression of a nucleic acid encoding a YiAP2 polypeptide, which plants have enhanced yield-related traits relative to corresponding wild type plants or other control plants. The invention also provides constructs useful in the methods of the invention.

[0009] The ever-increasing world population and the dwindling supply of arable land available for agriculture fuels research towards increasing the efficiency of agriculture. Conventional means for crop and horticultural improvements utilise selective breeding techniques to identify plants having desirable characteristics. However, such selective breeding techniques have several drawbacks, namely that these techniques are typically labour intensive and result in plants that often contain heterogeneous genetic components that may not always result in the desirable trait being passed on from parent plants. Advances in molecular biology have allowed mankind to modify the germplasm of animals and plants. Genetic engineering of plants entails the isolation and manipulation of genetic material (typically in the form of DNA or RNA) and the subsequent introduction of that genetic material into a plant. Such technology has the capacity to deliver crops or plants having various improved economic, agronomic or horticultural traits.

[0010] A trait of particular economic interest is increased yield. Yield is normally defined as the measurable produce of economic value from a crop. This may be defined in terms of quantity and/or quality. Yield is directly dependent on several factors, for example, the number and size of the organs, plant architecture (for example, the number of branches), seed production, leaf senescence and more. Root development, nutrient uptake, stress tolerance and early vigour may also be important factors in determining yield. Optimizing the abovementioned factors may therefore contribute to increasing crop yield.

[0011] Seed yield is a particularly important trait, since the seeds of many plants are important for human and animal nutrition. Crops such as corn, rice, wheat, canola and soybean account for over half the total human caloric intake, whether through direct consumption of the seeds themselves or through consumption of meat products raised on processed seeds. They are also a source of sugars, oils and many kinds of metabolites used in industrial processes. Seeds contain an embryo (the source of new shoots and roots) and an endosperm (the source of nutrients for embryo growth during germination and during early growth of seedlings). The development of a seed involves many genes, and requires the transfer of metabolites from the roots, leaves and stems into the growing seed. The endosperm, in particular, assimilates the metabolic precursors of carbohydrates, oils and proteins and synthesizes them into storage macromolecules to fill out the grain.

[0012] Another important trait for many crops is early vigour. Improving early vigour is an important objective of modern rice breeding programs in both temperate and tropical rice cultivars. Long roots are important for proper soil anchorage in water-seeded rice. Where rice is sown directly into flooded fields, and where plants must emerge rapidly through water, longer shoots are associated with vigour. Where drill-seeding is practiced, longer mesocotyls and coleoptiles are important for good seedling emergence. The ability to engineer early vigour into plants would be of great importance in agriculture. For example, poor early vigour has been a limitation to the introduction of maize (Zea mays L.) hybrids based on Corn Belt germplasm in the European Atlantic.

[0013] A further important trait is that of improved abiotic stress tolerance. Abiotic stress is a primary cause of crop loss worldwide, reducing average yields for most major crop plants by more than 50% (Wang et al., Planta 218, 1-14, 2003). Abiotic stresses may be caused by drought, salinity, extremes of temperature, chemical toxicity and oxidative stress. The ability to improve plant tolerance to abiotic stress would be of great economic advantage to farmers worldwide and would allow for the cultivation of crops during adverse conditions and in territories where cultivation of crops may not otherwise be possible.

[0014] Crop yield may therefore be increased by optimising one of the above-mentioned factors.

[0015] Depending on the end use, the modification of certain yield traits may be favoured over others. For example for applications such as forage or wood production, or bio-fuel resource, an increase in the vegetative parts of a plant may be desirable, and for applications such as flour, starch or oil production, an increase in seed parameters may be particularly desirable. Even amongst the seed parameters, some may be favoured over others, depending on the application. Various mechanisms may contribute to increasing seed yield, whether that is in the form of increased seed size or increased seed number.

[0016] One approach to increasing yield (seed yield and/or biomass) in plants may be through modification of the inherent growth mechanisms of a plant, such as the cell cycle or various signalling pathways involved in plant growth or in defense mechanisms.

[0017] It has now been found that various yield-related traits may be improved in plants by modulating expression in a plant of a nucleic acid encoding a FSM1-like (Fruit Sant/Myb) polypeptide, or a PIF3-like (Phytochrome Interacting Factor 3) polypeptide, or a UROD (Uroporphyrinogen III decarboxylase) polypeptide, or an AS-MTT (Abiotic Stress Membrane Tethered Transcription factor) polypeptide, or an EXO-1 (Protein Of Interest) polypeptide, or a YiAP2 polypeptide, in a plant.

### BACKGROUND

### 1. FSM1-Like (Fruit Sant/Myb) Polypeptides

[0018] FSM1-like proteins are transcription factors characterised by the presence of a SANT/MYB domain. They were first described in tomato (Barg et al., Planta 221, 197-211, 2005); and are reportedly involved in the determination of floral symmetry (Corley et al., Proc. Natl. Acad. Sci. 102, 5068-5073, 2005). The RADIALIS protein for example, an FSM1-like protein in Antirrhinium, is expressed in the dorsal region of the floral meristem, where it interacts with CYC and DICH to control the flower asymmetry (Baxter et al. Plant J. 52, 105-113, 2007). Tomato FSM1 is expressed in the fruit during the very early developmental stages. Ectopic expression of tomato fsml in Arabidopsis resulted in severe developmental alterations manifested in retarded growth, and reduced apical dominance during tomato and Arabidopsis seedling development (Barg et al., 2005).

### 2. PIF3-Like (Phytochrome Interacting Factor 3) Polypeptides

[0019] Phytochromes are dimeric chromoproteins that regulate plant responses to red (R) and far-red (FR) light. The Arabidopsis thaliana genome encodes five phytochrome apoproteins: type I phyA mediates responses to FR, and type II phyB-phyE mediate shade avoidance and classical R/FR-reversible responses. Roles in light regulation of hypocotyl length, leaf area, and flowering time are demonstrated for heterodimeric phytochromes containing phyC or phyE. Following a pulse of red light, phyA, phyB, phyC, and phyD interact in vivo with the PIF3 (PHYTOCHROME INTERACTING FACTOR3) basic helix-loop-helix transcription factor, and this interaction is FR reversible. Therefore, most or all of the type I and type II phytochromes, including heterodimeric forms, appear to function through PIF-mediated pathways (Clack et al., Plant Cell. 2009 March; 21(3):786-99).

[0020] In Arabidopsis, members of the PIF family have been shown to control light-regulated gene expression directly and indirectly. PIF1, PIF3, PIF4 and PIF5 are degraded in response to light signals, and physical interaction of PIF3 with phytochromes is necessary for the light-induced phosphorylation and degradation of PIF3. (Castillon et al., Trands in Plant Science, Volume 12, Issue 11, November 2007, Pages 514-521)

### 3. UROD (Uroporphyrinogen III Decarboxylase) Polypeptide

[0021] Uroporphyrinogen III decarboxylase or UROD is an enzyme involved in the conversion of uroporphyrinogen-III into coporphyrinogen, a precursor in heme or chlorophyll biosynthesis. The enzymatic reaction is as follows:

uroporphyrinogen-III<=>4CO2+coproporphyrinogen III

[0022] Martins et al., 2001 (The Journal of Biological Chemistry Vol. 276, No. 47, Issue of November 23, pp. 44108-44116) describe the crystal structure and substrate binding modeling of the Uroporphyrinogen-III Decarboxylase from Nicotiana tabacum.

[0023] Mohanty et al., 2006 (Planta 224: 692-699) report that the uroporphyrinogen decarboxylase gene (UroD) and gene product abundance was stimulated by light and heat-stress. Also reported is increased enzymatic activity of UroD in heat-stressed cucumber seedlings.

[0024] Mock and Grimm 1997 (Plant Physiol. 113: 1101-111 report introducing a full-length cDNA sequence encoding tobacco (Nicotiana tabacum) uroporphyrinogen III decarboxylase (UROD; EC 4.1.1.37) in reverse orientation under the control of a cauliflower mosaic virus 35s promoter derivative into the tobacco genome to study the effects of deregulated UROD expression on tetrapyrrole biosynthesis. The authors report the transformants to have reduced UROD activity and stunted plant growth and necrotic leaf lesions. They further report that antisense RNA expression caused reduced UROD protein levels and reduced activity to 45% of wild type, which was correlated with the accumulation of uroporphyrin(ogen) and with the intensity of necrotic damage. Also mentioned is that chlorophyll levels were only slightly reduced (up to 15%), indicating that the plants sustained cellular damage from accumulating photosensitive porphyrins rather than from chlorophyll deficiency.

### 4. AS-MTT (Abiotic Stress Membrane Tethered Transcription Factor) Polypeptides

[0025] Membrane-tethered transcription factors (MTTFs) differ from cytosolic transcription factors (TF) in that they are innately membrane-bound. To attain TF activity, MTTFs are released from the membrane anchor as a result of proteolytic cleavage. This enables MTTFs to travel to the nucleus and modulate gene expression. A genome-scale analysis showed that over 10% of all transcription factors are membrane bound, indicating that activation of MTFs occurs at the genomic level, allowing transcription to be regulated rapidly under stressful conditions. Seo et al. (2008). Trends Plant Sci. 13(10):550-556. Arabidopsis MTTFs characterized to date belong to either the bZIP or the NAC family. Chen et al. (2008). Curr Opin Plant Biol. 11(6):695-701. The current application characterizes a novel class of MTTFs, the AS-MTT (Abiotic Stress-MT), which comprise a DUF 1664 domain. DUF 1664 refers to a protein domain of previously unknown function which is highly conserved amongst plant MTTFs.

### 5. EXO-1 Polypeptide

[0026] RAD2 nucleases are involved in DNA repair processes. They exist in all eukaryotic organisms. There is at least 4-5 classes based on sequence and activity. XPG (Class I): incises the target strand 3′ to the bubble-like, damage-containing structure. FEN-1 (Class II) exhibits a flap endonuclease activity for bifurcated DNA structures. Exo-1 (Class III) operates as a 5′-nuclease (i.e. either a 5′-flap endonuclease or a 5′-3′ exonuclease). SEND/GEN (Class IV) is still yet unclear in the opinion of scientific community.

### 6. YiAP2 Polypeptides

[0027] The APETALA2-like genes form a large multi-gene family of transcription factors which play an important role during the plant life cycle, being key regulators of many developmental processes. Many studies in Arabidopsis have revealed that the APETALA2 (AP2) gene is implicated in the establishment of floral meristem and floral organ identity as well as temporal and spatial regulation of flower homeotic gene expression (Gil-Humanes et al. 2009 BMC Plant Biol. 29; 9(1):66). The APETALA2-like (AP2-like) gene family exhibits patterns of both gene and domain duplication, coupled with changes in sequence, exon arrangement, and expression. Genetic evolution studies analyses of AP2-like genes from green plants support the presence of the two major lineages in the AP2-like genes, the euAP2 and the AINTEGUMENTA (ANT). Furthermore a duplication of the AP2 domain occurred prior to the separation of the two lineages. The ANT lineage is supported by a 10-aa insertion in the AP2-R1 domain and a 1-aa insertion in the AP2-R2 domain, relative to all other members of the AP2-like family. MicroRNA172-binding sequences, the function of which has been studied in some of the AP2-like genes in Arabidopsis, are restricted to the euAP2 lineage and therefore absent from AP2-like proteins of the ANT lineage (Kim et al; Mol Biol Evol. 2006 January; 23(1):107-20). Protein encoded by members of the euAP2 gene family, which posses only one AP2 domain, more specifically of the ERF type have been previously described as useful to use in methods to enhance yield-related traits in plants (WO 2007/144190). Surprisingly, it has now been found that modulating expression of a nucleic acid encoding an AP2-like polypeptide of the ANT linage, the YiAP2 polypeptide, gives plants having enhanced yield-related traits relative to control plants.

[0028] According one embodiment, there is provided a method for improving yield-related traits in plants relative to control plants, comprising modulating expression in a plant of a nucleic acid encoding a YiAP2 polypeptide.

### SUMMARY

### 1. FSM1-Like (Fruit Sant/Myb) Polypeptides

[0029] Surprisingly, it has now been found that modulating expression of a nucleic acid encoding a FSM1-like polypeptide gives plants having enhanced yield-related traits, in particular increased yield relative to control plants.

[0030] According one embodiment, there is provided a method for improving yield-related traits in plants relative to control plants, comprising modulating expression in a plant of a nucleic acid encoding a FSM1-like polypeptide.

### 2. PIF3-Like (Phytochrome Interacting Factor 3) Polypeptides

[0031] Surprisingly, it has now been found that modulating expression of a nucleic acid encoding a PIF3-like polypeptide gives plants having enhanced yield-related traits, in particular increased seed yield and/or early vigour, relative to control plants.

[0032] According one embodiment, there is provided a method for improving yield-related traits in plants relative to control plants, comprising modulating expression in a plant of a nucleic acid encoding a PIF3-like polypeptide.

### 3. UROD (Uroporphyrinogen III Decarboxylase) Polypeptide

[0033] Surprisingly, it has now been found that modulating expression of a nucleic acid encoding a UROD polypeptide gives plants having enhanced yield-related traits, in particular increased yield relative to control plants.

[0034] According one embodiment, there is provided a method for improving yield-related traits in plants relative to control plants, comprising modulating expression in a plant of a nucleic acid encoding a UROD polypeptide.

### 4. AS-MTT (Abiotic Stress Membrane Tethered Transcription Factor) Polypeptides

[0035] Surprisingly, it has now been found that modulating expression of a nucleic acid encoding an AS-MTT polypeptide gives plants having enhanced yield-related traits, relative to control plants.

[0036] According one embodiment, there is provided a method for enhancing yield related traits of a plant relative to control plants, comprising modulating expression of a nucleic acid encoding an AS-MTT polypeptide in a plant.

### 5. EXO-1 Polypeptide

[0037] Surprisingly, it has now been found that modulating expression of a nucleic acid encoding an EXO-1 polypeptide gives plants having enhanced yield-related traits, in particular increased yield relative to control plants.

[0038] According one embodiment, there is provided a method for improving yield-related traits in plants relative to control plants, comprising modulating expression in a plant of a nucleic acid encoding an EXO-1 polypeptide.

### DEFINITIONS

[0039] The following definitions will be used throughout the present specification.

### Polypeptide(s)/Protein(s)

[0040] The terms “polypeptide” and “protein” are used interchangeably herein and refer to amino acids in a polymeric form of any length, linked together by peptide bonds.

### Polynucleotide(s)/Nucleic Acid(s)/Nucleic Acid Sequence(s)/Nucleotide Sequence(s)

[0041] The terms “polynucleotide(s)”, “nucleic acid sequence(s)”, “nucleotide sequence(s)”, “nucleic acid(s)”, “nucleic acid molecule” are used interchangeably herein and refer to nucleotides, either ribonucleotides or deoxyribonucleotides or a combination of both, in a polymeric unbranched form of any length.

### Homologue(s)

[0042] “Homologues” of a protein encompass peptides, oligopeptides, polypeptides, proteins and enzymes having amino acid substitutions, deletions and/or insertions relative to the unmodified protein in question and having similar biological and functional activity as the unmodified protein from which they are derived.

[0043] A deletion refers to removal of one or more amino acids from a protein.

[0044] An insertion refers to one or more amino acid residues being introduced into a predetermined site in a protein. Insertions may comprise N-terminal and/or C-terminal fusions as well as intra-sequence insertions of single or multiple amino acids. Generally, insertions within the amino acid sequence will be smaller than N- or C-terminal fusions, of the order of about 1 to 10 residues. Examples of N- or C-terminal fusion proteins or peptides include the binding domain or activation domain of a transcriptional activator as used in the yeast two-hybrid system, phage coat proteins, (histidine)-6-tag, glutathione S-transferase-tag, protein A, maltose-binding protein, dihydrofolate reductase, Tag•100 epitope, c-myc epitope, FLAG®-epitope, lacZ, CMP (calmodulin-binding peptide), HA epitope, protein C epitope and VSV epitope.

[0045] A substitution refers to replacement of amino acids of the protein with other amino acids having similar properties (such as similar hydrophobicity, hydrophilicity, antigenicity, propensity to form or break α-helical structures or β-sheet structures). Amino acid substitutions are typically of single residues, but may be clustered depending upon functional constraints placed upon the polypeptide and may range from 1 to 10 amino acids; insertions will usually be of the order of about 1 to 10 amino acid residues. The amino acid substitutions are preferably conservative amino acid substitutions. Conservative substitution tables are well known in the art (see for example Creighton (1984) Proteins. W.H. Freeman and Company (Eds) and Table 1 below).

TABLE 1
Examples of conserved amino acid substitutions

| | Conservative | | Conservative |
|---|---|---|---|
| Residue | Substitutions | Residue | Substitutions |
| Ala | Ser | Leu | Ile; Val |
| Arg | Lys | Lys | Arg; Gln |
| Asn | Gln; His | Met | Leu; Ile |
| Asp | Glu | Phe | Met; Leu; Tyr |
| Gln | Asn | Ser | Thr; Gly |
| Cys | Ser | Thr | Ser; Val |
| Glu | Asp | Trp | Tyr |
| Gly | Pro | Tyr | Trp; Phe |
| His | Asn; Gln | Val | Ile; Leu |
| Ile | Leu, Val | | |

[0046] Amino acid substitutions, deletions and/or insertions may readily be made using peptide synthetic techniques well known in the art, such as solid phase peptide synthesis and the like, or by recombinant DNA manipulation. Methods for the manipulation of DNA sequences to produce substitution, insertion or deletion variants of a protein are well known in the art. For example, techniques for making substitution mutations at predetermined sites in DNA are well known to those skilled in the art and include M13 mutagenesis, T7-Gen in vitro mutagenesis (USB, Cleveland, Ohio), QuickChange Site Directed mutagenesis (Stratagene, San Diego, Calif.), PCR-mediated site-directed mutagenesis or other site-directed mutagenesis protocols.

### Derivatives

[0047] “Derivatives” include peptides, oligopeptides, polypeptides which may, compared to the amino acid sequence of the naturally-occurring form of the protein, such as the protein of interest, comprise substitutions of amino acids with non-naturally occurring amino acid residues, or additions of non-naturally occurring amino acid residues. “Derivatives” of a protein also encompass peptides, oligopeptides, polypeptides which comprise naturally occurring altered (glycosylated, acylated, prenylated, phosphorylated, myristoylated, sulphated etc.) or non-naturally altered amino acid residues compared to the amino acid sequence of a naturally-occurring form of the polypeptide. A derivative may also comprise one or more non-amino acid substituents or additions compared to the amino acid sequence from which it is derived, for example a reporter molecule or other ligand, covalently or non-covalently bound to the amino acid sequence, such as a reporter molecule which is bound to facilitate its detection, and non-naturally occurring amino acid residues relative to the amino acid sequence of a naturally-occurring protein. Furthermore, “derivatives” also include fusions of the naturally-occurring form of the protein with tagging peptides such as FLAG, HIS6 or thioredoxin (for a review of tagging peptides, see Terpe, Appl. Microbiol. Biotechnol. 60, 523-533, 2003).

### Orthologue(s)/Paralogue(s)

[0048] Orthologues and paralogues encompass evolutionary concepts used to describe the ancestral relationships of genes. Paralogues are genes within the same species that have originated through duplication of an ancestral gene; orthologues are genes from different organisms that have originated through speciation, and are also derived from a common ancestral gene.

### Domain, Motif/Consensus Sequence/Signature

[0049] The term “domain” refers to a set of amino acids conserved at specific positions along an alignment of sequences of evolutionarily related proteins. While amino acids at other positions can vary between homologues, amino acids that are highly conserved at specific positions indicate amino acids that are likely essential in the structure, stability or function of a protein. Identified by their high degree of conservation in aligned sequences of a family of protein homologues, they can be used as identifiers to determine if any polypeptide in question belongs to a previously identified polypeptide family.

[0050] The term “motif” or “consensus sequence” or “signature” refers to a short conserved region in the sequence of evolutionarily related proteins. Motifs are frequently highly conserved parts of domains, but may also include only part of the domain, or be located outside of conserved domain (if all of the amino acids of the motif fall outside of a defined domain).

[0051] Specialist databases exist for the identification of domains, for example, SMART (Schultz et al. (1998) Proc. Natl. Acad. Sci. USA 95, 5857-5864; Letunic et al. (2002) Nucleic Acids Res 30, 242-244), InterPro (Mulder et al., (2003) Nucl. Acids. Res. 31, 315-318), Prosite (Bucher and Bairoch (1994), A generalized profile syntax for biomolecular sequences motifs and its function in automatic sequence interpretation. (In) ISMB-94; Proceedings 2nd International Conference on Intelligent Systems for Molecular Biology. Altman R., Brutlag D., Karp P., Lathrop R., Searls D., Eds., pp 53-61, AAAI Press, Menlo Park; Hulo et al., Nucl. Acids. Res. 32:D134-D137, (2004)), or Pfam (Bateman et al., Nucleic Acids Research 30(1): 276-280 (2002)). A set of tools for in sllico analysis of protein sequences is available on the ExPASy proteomics server (Swiss Institute of Bioinformatics (Gasteiger et al., ExPASy: the proteomics server for in-depth protein knowledge and analysis, Nucleic Acids Res. 31:3784-3788 (2003)). Domains or motifs may also be identified using routine techniques, such as by sequence alignment.

[0052] Methods for the alignment of sequences for comparison are well known in the art, such methods include GAP, BESTFIT, BLAST, FASTA and TFASTA. GAP uses the algorithm of Needleman and Wunsch ((1970) J Mol Biol 48: 443-453) to find the global (i.e. spanning the complete sequences) alignment of two sequences that maximizes the number of matches and minimizes the number of gaps. The BLAST algorithm (Altschul et al. (1990) J Mol Biol 215: 403-10) calculates percent sequence identity and performs a statistical analysis of the similarity between the two sequences. The software for performing BLAST analysis is publicly available through the National Centre for Biotechnology Information (NCBI). Homologues may readily be identified using, for example, the ClustalW multiple sequence alignment algorithm (version 1.83), with the default pairwise alignment parameters, and a scoring method in percentage. Global percentages of similarity and identity may also be determined using one of the methods available in the MatGAT software package (Campanella et al., BMC Bioinformatics. 2003 Jul. 10; 4:29. MatGAT: an application that generates similarity/identity matrices using protein or DNA sequences.). Minor manual editing may be performed to optimise alignment between conserved motifs, as would be apparent to a person skilled in the art. Furthermore, instead of using full-length sequences for the identification of homologues, specific domains may also be used. The sequence identity values may be determined over the entire nucleic acid or amino acid sequence or over selected domains or conserved motif(s), using the programs mentioned above using the default parameters. For local alignments, the Smith-Waterman algorithm is particularly useful (Smith T F, Waterman M S (1981) J. Mol. Biol 147(1); 195-7).

### Reciprocal BLAST

[0053] Typically, this involves a first BLAST involving BLASTing a query sequence (for example using any of the sequences listed in Table A of the Examples section) against any sequence database, such as the publicly available NCBI database. BLASTN or TBLASTX (using standard default values) are generally used when starting from a nucleotide sequence, and BLASTP or TBLASTN (using standard default values) when starting from a protein sequence. The BLAST results may optionally be filtered. The full-length sequences of either the filtered results or non-filtered results are then BLASTed back (second BLAST) against sequences from the organism from which the query sequence is derived. The results of the first and second BLASTs are then compared. A paralogue is identified if a high-ranking hit from the first blast is from the same species as from which the query sequence is derived, a BLAST back then ideally results in the query sequence amongst the highest hits; an orthologue is identified if a high-ranking hit in the first BLAST is not from the same species as from which the query sequence is derived, and preferably results upon BLAST back in the query sequence being among the highest hits.

[0054] High-ranking hits are those having a low E-value. The lower the E-value, the more significant the score (or in other words the lower the chance that the hit was found by chance). Computation of the E-value is well known in the art. In addition to E-values, comparisons are also scored by percentage identity. Percentage identity refers to the number of identical nucleotides (or amino acids) between the two compared nucleic acid (or polypeptide) sequences over a particular length. In the case of large families, ClustalW may be used, followed by a neighbour joining tree, to help visualize clustering of related genes and to identify orthologues and paralogues.

### Hybridisation

[0055] The term “hybridisation” as defined herein is a process wherein substantially homologous complementary nucleotide sequences anneal to each other. The hybridisation process can occur entirely in solution, i.e. both complementary nucleic acids are in solution. The hybridisation process can also occur with one of the complementary nucleic acids immobilised to a matrix such as magnetic beads, Sepharose beads or any other resin. The hybridisation process can furthermore occur with one of the complementary nucleic acids immobilised to a solid support such as a nitro-cellulose or nylon membrane or immobilised by e.g. photolithography to, for example, a siliceous glass support (the latter known as nucleic acid arrays or microarrays or as nucleic acid chips). In order to allow hybridisation to occur, the nucleic acid molecules are generally thermally or chemically denatured to melt a double strand into two single strands and/or to remove hairpins or other secondary structures from single stranded nucleic acids.

[0056] The term “stringency” refers to the conditions under which a hybridisation takes place. The stringency of hybridisation is influenced by conditions such as temperature, salt concentration, ionic strength and hybridisation buffer composition. Generally, low stringency conditions are selected to be about 30° C. lower than the thermal melting point (Tₘ) for the specific sequence at a defined ionic strength and pH. Medium stringency conditions are when the temperature is 20° C. below Tₘ, and high stringency conditions are when the temperature is 10° C. below Tₘ. High stringency hybridisation conditions are typically used for isolating hybridising sequences that have high sequence similarity to the target nucleic acid sequence. However, nucleic acids may deviate in sequence and still encode a substantially identical polypeptide, due to the degeneracy of the genetic code. Therefore medium stringency hybridisation conditions may sometimes be needed to identify such nucleic acid molecules.

[0057] The Tₘ is the temperature under defined ionic strength and pH, at which 50% of the target sequence hybridises to a perfectly matched probe. The Tₘ is dependent upon the solution conditions and the base composition and length of the probe. For example, longer sequences hybridise specifically at higher temperatures. The maximum rate of hybridisation is obtained from about 16° C. up to 32° C. below Tₘ. The presence of monovalent cations in the hybridisation solution reduce the electrostatic repulsion between the two nucleic acid strands thereby promoting hybrid formation; this effect is visible for sodium concentrations of up to 0.4M (for higher concentrations, this effect may be ignored). Formamide reduces the melting temperature of DNA-DNA and DNA-RNA duplexes with 0.6 to 0.7° C. for each percent formamide, and addition of 50% formamide allows hybridisation to be performed at 30 to 45° C., though the rate of hybridisation will be lowered. Base pair mismatches reduce the hybridisation rate and the thermal stability of the duplexes. On average and for large probes, the Tm decreases about 1° C. per % base mismatch. The Tₘ may be calculated using the following equations, depending on the types of hybrids:

1) DNA-DNA hybrids (Meinkoth and Wahl, Anal. Biochem., 138: 267-284, 1984):

Tₘ=81.5° C.+16.6×log₁₀[Na⁺]^{a}+0.41×%[G/C^{b}]−500×[L^{c}]⁻¹−0.61×% formamide

2) DNA-RNA or RNA-RNA hybrids:

Tₘ=79.8° C.+18.5(log₁₀[Na⁺]^{a})+0.58(% G/C^{b})+11.8(% G/C^{b})²−820/L^{c}

### 3) Oligo-DNA or Oligo-RNAs Hybrids:

[0058] For <20nucleotides:Tₘ=2(Iₐ)

For 20-35nucleotides:Tₘ=22+1.46(Iₐ)
[0059] ^{a}or for other monovalent cation, but only accurate in the 0.01-0.4 M range.
[0060] ^{b}only accurate for % GC in the 30% to 75% range.
[0061] ^{c}L=length of duplex in base pairs.
[0062] ^{d}oligo, oligonucleotide; lₙ, =effective length of primer=2×(no. of G/C)+(no. of A/T).

[0063] Non-specific binding may be controlled using any one of a number of known techniques such as, for example, blocking the membrane with protein containing solutions, additions of heterologous RNA, DNA, and SDS to the hybridisation buffer, and treatment with Rnase. For non-homologous probes, a series of hybridizations may be performed by varying one of (i) progressively lowering the annealing temperature (for example from 68° C. to 42° C.) or (ii) progressively lowering the formamide concentration (for example from 50% to 0%). The skilled artisan is aware of various parameters which may be altered during hybridisation and which will either maintain or change the stringency conditions.

[0064] Besides the hybridisation conditions, specificity of hybridisation typically also depends on the function of post-hybridisation washes. To remove background resulting from non-specific hybridisation, samples are washed with dilute salt solutions. Critical factors of such washes include the ionic strength and temperature of the final wash solution: the lower the salt concentration and the higher the wash temperature, the higher the stringency of the wash. Wash conditions are typically performed at or below hybridisation stringency. A positive hybridisation gives a signal that is at least twice of that of the background. Generally, suitable stringent conditions for nucleic acid hybridisation assays or gene amplification detection procedures are as set forth above. More or less stringent conditions may also be selected. The skilled artisan is aware of various parameters which may be altered during washing and which will either maintain or change the stringency conditions.

[0065] For example, typical high stringency hybridisation conditions for DNA hybrids longer than 50 nucleotides encompass hybridisation at 65° C. in 1×SSC or at 42° C. in 1×SSC and 50% formamide, followed by washing at 65° C. in 0.3×SSC. Examples of medium stringency hybridisation conditions for DNA hybrids longer than 50 nucleotides encompass hybridisation at 50° C. in 4×SSC or at 40° C. in 6×SSC and 50% formamide, followed by washing at 50° C. in 2×SSC. The length of the hybrid is the anticipated length for the hybridising nucleic acid. When nucleic acids of known sequence are hybridised, the hybrid length may be determined by aligning the sequences and identifying the conserved regions described herein. 1×SSC is 0.15M NaCl and 15 mM sodium citrate; the hybridisation solution and wash solutions may additionally include 5×Denhardt's reagent, 0.5-1.0% SDS, 100 μg/ml denatured, fragmented salmon sperm DNA, 0.5% sodium pyrophosphate.

[0066] For the purposes of defining the level of stringency, reference can be made to Sambrook et al. (2001) Molecular Cloning: a laboratory manual, 3^{rd} Edition, Cold Spring Harbor Laboratory Press, CSH, New York or to Current Protocols in Molecular Biology, John Wiley & Sons, N.Y. (1989 and yearly updates).

### Splice Variant

[0067] The term “splice variant” as used herein encompasses variants of a nucleic acid sequence in which selected introns and/or exons have been excised, replaced, displaced or added, or in which introns have been shortened or lengthened. Such variants will be ones in which the biological activity of the protein is substantially retained; this may be achieved by selectively retaining functional segments of the protein. Such splice variants may be found in nature or may be manmade. Methods for predicting and isolating such splice variants are well known in the art (see for example Foissac and Schiex (2005) BMC Bioinformatics 6: 25).

### Allelic Variant

[0068] Alleles or allelic variants are alternative forms of a given gene, located at the same chromosomal position. Allelic variants encompass Single Nucleotide Polymorphisms (SNPs), as well as Small Insertion/Deletion Polymorphisms (INDELs). The size of INDELs is usually less than 100 bp. SNPs and INDELs form the largest set of sequence variants in naturally occurring polymorphic strains of most organisms.

### Endogenous Gene

[0069] Reference herein to an “endogenous” gene not only refers to the gene in question as found in a plant in its natural form (i.e., without there being any human intervention), but also refers to that same gene (or a substantially homologous nucleic acid/gene) in an isolated form subsequently (re)introduced into a plant (a transgene). For example, a transgenic plant containing such a transgene may encounter a substantial reduction of the transgene expression and/or substantial reduction of expression of the endogenous gene. The isolated gene may be isolated from an organism or may be manmade, for example by chemical synthesis.

### Gene Shuffling/Directed Evolution

[0070] Gene shuffling or directed evolution consists of iterations of DNA shuffling followed by appropriate screening and/or selection to generate variants of nucleic acids or portions thereof encoding proteins having a modified biological activity (Castle et al., (2004) Science 304(5674): 1151-4; U.S. Pat. Nos. 5,811,238 and 6,395,547).

### Construct

[0071] Additional regulatory elements may include transcriptional as well as translational enhancers. Those skilled in the art will be aware of terminator and enhancer sequences that may be suitable for use in performing the invention. An intron sequence may also be added to the 5′ untranslated region (UTR) or in the coding sequence to increase the amount of the mature message that accumulates in the cytosol, as described in the definitions section. Other control sequences (besides promoter, enhancer, silencer, intron sequences, 3′UTR and/or 5′UTR regions) may be protein and/or RNA stabilizing elements. Such sequences would be known or may readily be obtained by a person skilled in the art.

[0072] The genetic constructs of the invention may further include an origin of replication sequence that is required for maintenance and/or replication in a specific cell type. One example is when a genetic construct is required to be maintained in a bacterial cell as an episomal genetic element (e.g. plasmid or cosmid molecule). Preferred origins of replication include, but are not limited to, the fl-on and colE1.

[0073] For the detection of the successful transfer of the nucleic acid sequences as used in the methods of the invention and/or selection of transgenic plants comprising these nucleic acids, it is advantageous to use marker genes (or reporter genes). Therefore, the genetic construct may optionally comprise a selectable marker gene. Selectable markers are described in more detail in the “definitions” section herein. The marker genes may be removed or excised from the transgenic cell once they are no longer needed. Techniques for marker removal are known in the art, useful techniques are described above in the definitions section.

Regulatory element/Control sequence/Promoter

[0074] The terms “regulatory element”, “control sequence” and “promoter” are all used interchangeably herein and are to be taken in a broad context to refer to regulatory nucleic acid sequences capable of effecting expression of the sequences to which they are ligated. The term “promoter” typically refers to a nucleic acid control sequence located upstream from the transcriptional start of a gene and which is involved in recognising and binding of RNA polymerase and other proteins, thereby directing transcription of an operably linked nucleic acid. Encompassed by the aforementioned terms are transcriptional regulatory sequences derived from a classical eukaryotic genomic gene (including the TATA box which is required for accurate transcription initiation, with or without a CCAAT box sequence) and additional regulatory elements (i.e. upstream activating sequences, enhancers and silencers) which alter gene expression in response to developmental and/or external stimuli, or in a tissue-specific manner. Also included within the term is a transcriptional regulatory sequence of a classical prokaryotic gene, in which case it may include a −35 box sequence and/or −10 box transcriptional regulatory sequences. The term “regulatory element” also encompasses a synthetic fusion molecule or derivative that confers, activates or enhances expression of a nucleic acid molecule in a cell, tissue or organ.

[0075] A “plant promoter” comprises regulatory elements, which mediate the expression of a coding sequence segment in plant cells. Accordingly, a plant promoter need not be of plant origin, but may originate from viruses or micro-organisms, for example from viruses which attack plant cells. The “plant promoter” can also originate from a plant cell, e.g. from the plant which is transformed with the nucleic acid sequence to be expressed in the inventive process and described herein. This also applies to other “plant” regulatory signals, such as “plant” terminators. The promoters upstream of the nucleotide sequences useful in the methods of the present invention can be modified by one or more nucleotide substitution(s), insertion(s) and/or deletion(s) without interfering with the functionality or activity of either the promoters, the open reading frame (ORF) or the 3′-regulatory region such as terminators or other 3′ regulatory regions which are located away from the ORF. It is furthermore possible that the activity of the promoters is increased by modification of their sequence, or that they are replaced completely by more active promoters, even promoters from heterologous organisms. For expression in plants, the nucleic acid molecule must, as described above, be linked operably to or comprise a suitable promoter which expresses the gene at the right point in time and with the required spatial expression pattern.

[0076] For the identification of functionally equivalent promoters, the promoter strength and/or expression pattern of a candidate promoter may be analysed for example by operably linking the promoter to a reporter gene and assaying the expression level and pattern of the reporter gene in various tissues of the plant. Suitable well-known reporter genes include for example beta-glucuronidase or beta-galactosidase. The promoter activity is assayed by measuring the enzymatic activity of the beta-glucuronidase or beta-galactosidase. The promoter strength and/or expression pattern may then be compared to that of a reference promoter (such as the one used in the methods of the present invention). Alternatively, promoter strength may be assayed by quantifying mRNA levels or by comparing mRNA levels of the nucleic acid used in the methods of the present invention, with mRNA levels of housekeeping genes such as 18S rRNA, using methods known in the art, such as Northern blotting with densitometric analysis of autoradiograms, quantitative real-time PCR or RT-PCR (Heid et al., 1996 Genome Methods 6: 986-994). Generally by “weak promoter” is intended a promoter that drives expression of a coding sequence at a low level. By “low level” is intended at levels of about 1/10,000 transcripts to about 1/100,000 transcripts, to about 1/500,0000 transcripts per cell. Conversely, a “strong promoter” drives expression of a coding sequence at high level, or at about 1/10 transcripts to about 1/100 transcripts to about 1/1000 transcripts per cell. Generally, by “medium strength promoter” is intended a promoter that drives expression of a coding sequence at a lower level than a strong promoter, in particular at a level that is in all instances below that obtained when under the control of a 35S CaMV promoter.

### Operably Linked

[0077] The term “operably linked” as used herein refers to a functional linkage between the promoter sequence and the gene of interest, such that the promoter sequence is able to initiate transcription of the gene of interest.

### Constitutive Promoter

[0078] A “constitutive promoter” refers to a promoter that is transcriptionally active during most, but not necessarily all, phases of growth and development and under most environmental conditions, in at least one cell, tissue or organ. Table 2a below gives examples of constitutive promoters.

TABLE 2a
Examples of constitutive promoters

| Gene Source | Reference |
|---|---|
| Actin | McElroy et al, Plant Cell, 2: 163-171, 1990 |
| HMGP | WO 2004/070039 |
| CAMV 35S | Odell et al, Nature, 313: 810-812, 1985 |
| CaMV 19S | Nilsson et al., Physiol. Plant. 100: |
| | 456-462, 1997 |
| GOS2 | de Pater et al, Plant J Nov;2(6): 837-44, |
| | 1992, WO 2004/065596 |
| Ubiquitin | Christensen et al, Plant Mol. Biol. |
| | 18: 675-689, 1992 |
| Rice cyclophilin | Buchholz et al, Plant Mol Biol. |
| | 25(5): 837-43, 1994 |
| Maize H3 histone | Lepetit et al, Mol. Gen. Genet. 231: |
| | 276-285, 1992 |
| Alfalfa H3 histone | Wu et al. Plant Mol. Biol. |
| | 11: 641-649, 1988 |
| Actin 2 | An et al, Plant J. 10(1); 107-121, 1996 |
| 34S FMV | Sanger et al., Plant. Mol. Biol., |
| | 14, 1990: 433-443 |
| Rubisco small | U.S. Pat. No. 4,962,028 |
| subunit | |
| OCS | Leisner (1988) Proc Natl Acad Sci |
| | USA 85(5): 2553 |
| SAD1 | Jain et al., Crop Science, |
| | 39 (6), 1999: 1696 |
| SAD2 | Jain et al., Crop Science, |
| | 9 (6), 1999: 1696 |
| nos | Shaw et al. (1984) Nucleic Acids Res. |
| | 12(20): 7831-7846 |
| V-ATPase | WO 01/14572 |
| Super promoter | WO 95/14098 |
| G-box proteins | WO 94/12015 |

### Ubiquitous Promoter

[0079] A ubiquitous promoter is active in substantially all tissues or cells of an organism.

### Developmentally-Regulated Promoter

[0080] A developmentally-regulated promoter is active during certain developmental stages or in parts of the plant that undergo developmental changes.

### Inducible Promoter

[0081] An inducible promoter has induced or increased transcription initiation in response to a chemical (for a review see Gatz 1997, Annu. Rev. Plant Physiol. Plant Mol. Biol., 48:89-108), environmental or physical stimulus, or may be “stress-inducible”, i.e. activated when a plant is exposed to various stress conditions, or a “pathogen-inducible” i.e. activated when a plant is exposed to exposure to various pathogens.

### Organ-Specific/Tissue-Specific Promoter

[0082] An organ-specific or tissue-specific promoter is one that is capable of preferentially initiating transcription in certain organs or tissues, such as the leaves, roots, seed tissue etc. For example, a “root-specific promoter” is a promoter that is transcriptionally active predominantly in plant roots, substantially to the exclusion of any other parts of a plant, whilst still allowing for any leaky expression in these other plant parts. Promoters able to initiate transcription in certain cells only are referred to herein as “cell-specific”.

[0083] Examples of root-specific promoters are listed in Table 2b below:

TABLE 2b
Examples of root-specific promoters

| Gene Source | Reference |
|---|---|
| RCc3 | Plant Mol Biol. 1995 Jan; |
| | 27(2): 237-48 |
| Arabidopsis PHT1 | Koyama et al. J Biosci Bioeng. |
| | 2005 Jan; 99(1):38-42.; |
| | Mudge et al. (2002, Plant J. 31: 341) |
| Medicago phosphate | Xiao et al., 2006, Plant Biol |
| transporter | (Stuttg). 2006 |
| | Jul; 8(4): 439-49 |
| Arabidopsis Pyk10 | Nitz et al. (2001) Plant |
| | Sci 161(2): 337-346 |
| root-expressible genes | Tingey et al., EMBO J. 6: 1, 1987. |
| tobacco auxin-inducible | Van der Zaal et al., Plant |
| gene | Mol. Biol. 16, 983, 1991. |
| β-tubulin | Oppenheimer, et al., Gene |
| | 63: 87, 1988. |
| tobacco root-specific genes | Conkling, et al., Plant |
| | Physiol. 93: 1203, 1990. |
| B. napus G1-3b gene | U. S. Pat. No. 5,401,836 |
| SbPRP1 | Suzuki et al., Plant Mol. Biol. |
| | 21: 109-119, 1993. |
| LRX1 | Baumberger et al. 2001, |
| | Genes & Dev. 15: 1128 |
| BTG-26 Brassica napus | U. S. Pat. No. 20,050,044,585 |
| LeAMT1 (tomato) | Lauter et al. (1996, PNAS 3: 8139) |
| The LeNRT1-1 (tomato) | Lauter et al. (1996, PNAS 3: 8139) |
| class I patatin gene (potato) | Liu et al., Plant Mol. Biol. |
| | 17 (6): 1139-1154 |
| KDC1 (Daucus carota) | Downey et al. (2000, J. Biol. |
| | Chem. 275: 39420) |
| TobRB7 gene | W Song (1997) PhD Thesis, |
| | North Carolina State |
| | University, Raleigh, NC USA |
| OsRAB5a (rice) | Wang et al. 2002, Plant Sci. 163: 273 |
| ALF5 (Arabidopsis) | Diener et al. (2001, |
| | Plant Cell 13: 1625) |
| NRT2; 1Np | Quesada et al. (1997, |
| (N. plumbaginifolia) | Plant Mol. Biol. 34: 265) |

[0084] A seed-specific promoter is transcriptionally active predominantly in seed tissue, but not necessarily exclusively in seed tissue (in cases of leaky expression). The seed-specific promoter may be active during seed development and/or during germination. The seed specific promoter may be endosperm/aleurone/embryo specific. Examples of seed-specific promoters (endosperm/aleurone/embryo specific) are shown in Table 2c to Table 2f below. Further examples of seed-specific promoters are given in Qing Qu and Takaiwa (Plant Biotechnol. J. 2, 113-125, 2004), which disclosure is incorporated by reference herein as if fully set forth.

TABLE 2c
Examples of seed-specific promoters

| Gene source | Reference |
|---|---|
| seed-specific genes | Simon et al., Plant Mol. Biol. |
| | 5: 191, 1985; |
| | Scofield et al., J. Biol. Chem. |
| | 262: 12202, 1987.; |
| | Baszczynski et al., Plant Mol. |
| | Biol. 14: 633, 1990. |
| Brazil Nut albumin | Pearson et al., Plant Mol. |
| | Biol. 18: 235-245, 1992. |
| legumin | Ellis et al., Plant Mol. Biol. |
| | 10: 203-214, 1988. |
| glutelin (rice) | Takaiwa et al., Mol. Gen. |
| | Genet. 208: 15-22, 1986; |
| | Takaiwa et al., FEBS |
| | Letts. 221: 43-47, 1987. |
| zein | Matzke et al Plant Mol Biol, |
| | 14(3): 323-32 1990 |
| napA | Stalberg et al, Planta 199: |
| | 515-519, 1996. |
| wheat LMW and HMW | Mol Gen Genet 216: 81-90, |
| glutenin-1 | 1989; NAR 17: 461-2, 1989 |
| wheat SPA | Albani et al, Plant Cell, |
| | 9: 171-184, 1997 |
| wheat α, β, γ-gliadins | EMBO J. 3:1409-15, 1984 |
| barley Itr1 promoter | Diaz et al. (1995) Mol Gen |
| | Genet 248(5): 592-8 |
| barley B1, C, D, hordein | Theor Appl Gen 98: 1253-62, |
| | 1999; Plant J 4: 343-55, |
| | 1993; Mol Gen Genet 250: |
| | 750-60, 1996 |
| barley DOF | Mena et al, The Plant Journal, |
| | 116(1): 53-62, 1998 |
| blz2 | EP99106056.7 |
| synthetic promoter | Vicente-Carbajosa et al., |
| | Plant J. 13: 629-640, 1998. |
| rice prolamin NRP33 | Wu et al, Plant Cell Physiology |
| | 39(8) 885-889, 1998 |
| rice a-globulin Glb-1 | Wu et al, Plant Cell Physiology |
| | 39(8) 885-889, 1998 |
| rice OSH1 | Sato et al, Proc. Natl. Acad. Sci. |
| | USA, 93: 8117-8122, 1996 |
| rice α-globulin | Nakase et al. Plant Mol. |
| REB/OHP-1 | Biol. 33: 513-522, 1997 |
| rice ADP-glucose | Trans Res 6: 157-68, 1997 |
| pyrophosphorylase | |
| maize ESR gene family | Plant J 12: 235-46, 1997 |
| sorghum α-kafirin | DeRose et al., Plant Mol. |
| | Biol 32: 1029-35, 1996 |
| KNOX | Postma-Haarsma et al, Plant |
| | Mol. Biol. 39: 257-71, 1999 |
| rice oleosin | Wu et al, J. Biochem. 123: 386, 1998 |
| sunflower oleosin | Cummins et al., Plant Mol. |
| | Biol. 19: 873-876, 1992 |
| PRO0117, putative rice 40S | WO 2004/070039 |
| ribosomal protein | |
| PRO0136, rice alanine | unpublished |
| aminotransferase | |
| PRO0147, | trypsin inhibitor unpublished |
| ITR1 (barley) | |
| PRO0151, rice WSI18 | WO 2004/070039 |
| PRO0175, rice RAB21 | WO 2004/070039 |
| PRO005 | WO 2004/070039 |
| PRO0095 | WO 2004/070039 |
| α-amylase (Amy32b) | Lanahan et al, Plant Cell 4: 203-211, |
| | 1992; Skriver et al, Proc Natl Acad |
| | Sci USA 88: 7266-7270, 1991 |
| cathepsin β-like gene | Cejudo et al, Plant Mol Biol |
| | 20: 849-856, 1992 |
| Barley Ltp2 | Kalla et al., Plant J. 6: 849-60, 1994 |
| Chi26 | Leah et al., Plant J. 4: 579-89, 1994 |
| Maize B-Peru | Selinger et al., Genetics |
| | 149; 1125-38,1998 |

TABLE 2d
examples of endosperm-specific promoters

| Gene source | Reference |
|---|---|
| glutelin (rice) | Takaiwa et al. (1986) Mol Gen Genet 208: 15-22; |
| | Takaiwa et al. (1987) FEBS Letts. 221: 43-47 |
| zein | Matzke et al., (1990) Plant Mol Biol 14(3): 323-32 |
| wheat LMW and | Colot et al. (1989) Mol Gen Genet 216: 81-90, |
| HMW glutenin-1 | Anderson et al. (1989) NAR 17: 461-2 |
| wheat SPA | Albani et al. (1997) Plant Cell 9: 171-184 |
| wheat gliadins | Rafalski et al. (1984) EMBO 3: 1409-15 |
| barley Itr1 promoter | Diaz et al. (1995) Mol Gen Genet 248(5): 592-8 |
| barley B1, C, D, | Cho et al. (1999) Theor Appl Genet 98: 1253-62; |
| hordein | Muller et al. (1993) Plant J 4: 343-55; |
| | Sorenson et al. (1996) Mol Gen Genet 250: 750- |
| | 60 |
| barley DOF | Mena et al, (1998) Plant J 116(1): 53-62 |
| blz2 | Onate et al. (1999) J Biol Chem 274(14): 9175-82 |
| synthetic promoter | Vicente-Carbajosa et al. (1998) Plant J 13: 629- |
| | 640 |
| rice prolamin NRP33 | Wu et al, (1998) Plant Cell Physiol 39(8) 885-889 |
| rice globulin Glb-1 | Wu et al. (1998) Plant Cell Physiol 39(8) 885-889 |
| rice globulin REB/ | Nakase et al. (1997) Plant Molec Biol 33: 513- |
| OHP-1 | 522 |
| rice ADP-glucose | Russell et al. (1997) Trans Res 6: 157-68 |
| pyrophosphorylase | |
| maize ESR gene family | Opsahl-Ferstad et al. (1997) Plant J 12: 235-46 |
| sorghum kafirin | DeRose et al. (1996) Plant Mol Biol 32: 1029-35 |

TABLE 2e
Examples of embryo specific promoters:

| Gene source | Reference |
|---|---|
| rice OSH1 | Sato et al, Proc. Natl. Acad. Sci. USA, 93: 8117-8122, 1996 |
| KNOX | Postma-Haarsma et al, Plant Mol. Biol. 39: 257-71, 1999 |
| PRO0151 | WO 2004/070039 |
| PRO0175 | WO 2004/070039 |
| PRO005 | WO 2004/070039 |
| PRO0095 | WO 2004/070039 |

TABLE 2f
Examples of aleurone-specific promoters:

| Gene source | Reference |
|---|---|
| α-amylase | Lanahan et al, Plant Cell 4: 203-211, 1992; |
| (Amy32b) | Skriver et al, Proc Natl Acad Sci USA 88: |
| | 7266-7270,1991 |
| cathepsin β-like | Cejudo et al, Plant Mol Biol 20: |
| gene | 849-856, 1992 |
| Barley Ltp2 | Kalla et al., Plant J. 6: 849-60, 1994 |
| Chi26 | Leah et al., Plant J. 4: 579-89, 1994 |
| Maize B-Peru | Selinger et al., Genetics 149; 1125-38,1998 |

[0085] A green tissue-specific promoter as defined herein is a promoter that is transcriptionally active predominantly in green tissue, substantially to the exclusion of any other parts of a plant, whilst still allowing for any leaky expression in these other plant parts.

[0086] Examples of green tissue-specific promoters which may be used to perform the methods of the invention are shown in Table 2g below.

TABLE 2g
Examples of green tissue-specific promoters

| Gene | Expression | Reference |
|---|---|---|
| Maize Orthophosphate | Leaf specific | Fukavama et al., Plant Physiol. |
| dikinase | | 2001 Nov; 127(3): 1136-46 |
| Maize | Leaf specific | Kausch et al., Plant Mol Biol. |
| Phosphoenolpyruvate | | 2001 Jan; 45(1): 1-15 |
| carboxylase | | |
| Rice | Leaf specific | Lin et al., 2004 DNA Seq. 2004 |
| Phosphoenolpyruvate | | Aug; 15(4): 269-76 |
| carboxylase | | |
| Rice small | Leaf specific | Nomura et al., Plant Mol Biol. |
| subunit Rubisco | | 2000 Sep; 44(1): 99-106 |
| rice beta expansin | Shoot | WO 2004/070039 |
| EXBP9 | specific | |
| Pigeonpea small | Leaf specific | Panguluri et al., Indian J Exp Biol. |
| subunit Rubisco | | 2005 Apr; 43(4): 369-72 |
| Pea RBCS3A | Leaf specific | |

[0087] Another example of a tissue-specific promoter is a meristem-specific promoter, which is transcriptionally active predominantly in meristematic tissue, substantially to the exclusion of any other parts of a plant, whilst still allowing for any leaky expression in these other plant parts. Examples of green meristem-specific promoters which may be used to perform the methods of the invention are shown in Table 2h below.

TABLE 2h
Examples of meristem-specific promoters

| Gene source | Expression pattern | Reference |
|---|---|---|
| rice OSH1 | Shoot apical meristem, | Sato et al. (1996) Proc. |
| | from embryo globular stage | Natl. Acad. Sci. USA, |
| | to seedling stage | 93: 8117-8122 |
| Rice | Meristem specific | BAD87835.1 |
| metallothionein | | |
| WAK1 & | Shoot and root apical | Wagner & Kohorn (2001) |
| WAK 2 | meristems, and in | Plant Cell |
| | expanding leaves and | 13(2): 303-318 |
| | sepals | |

### Terminator

[0088] The term “terminator” encompasses a control sequence which is a DNA sequence at the end of a transcriptional unit which signals 3′ processing and polyadenylation of a primary transcript and termination of transcription. The terminator can be derived from the natural gene, from a variety of other plant genes, or from T-DNA. The terminator to be added may be derived from, for example, the nopaline synthase or octopine synthase genes, or alternatively from another plant gene, or less preferably from any other eukaryotic gene.

### Selectable Marker (Gene)/Reporter Gene

[0089] “Selectable marker”, “selectable marker gene” or “reporter gene” includes any gene that confers a phenotype on a cell in which it is expressed to facilitate the identification and/or selection of cells that are transfected or transformed with a nucleic acid construct of the invention. These marker genes enable the identification of a successful transfer of the nucleic acid molecules via a series of different principles. Suitable markers may be selected from markers that confer antibiotic or herbicide resistance, that introduce a new metabolic trait or that allow visual selection. Examples of selectable marker genes include genes conferring resistance to antibiotics (such as nptll that phosphorylates neomycin and kanamycin, or hpt, phosphorylating hygromycin, or genes conferring resistance to, for example, bleomycin, streptomycin, tetracyclin, chloramphenicol, ampicillin, gentamycin, geneticin (G418), spectinomycin or blasticidin), to herbicides (for example bar which provides resistance to Basta®; aroA or gox providing resistance against glyphosate, or the genes conferring resistance to, for example, imidazolinone, phosphinothricin or sulfonylurea), or genes that provide a metabolic trait (such as manA that allows plants to use mannose as sole carbon source or xylose isomerase for the utilisation of xylose, or antinutritive markers such as the resistance to 2-deoxyglucose). Expression of visual marker genes results in the formation of colour (for example β-glucuronidase, GUS or β-galactosidase with its coloured substrates, for example X-Gal), luminescence (such as the luciferin/luceferase system) or fluorescence (Green Fluorescent Protein, GFP, and derivatives thereof). This list represents only a small number of possible markers. The skilled worker is familiar with such markers. Different markers are preferred, depending on the organism and the selection method.

[0090] It is known that upon stable or transient integration of nucleic acids into plant cells, only a minority of the cells takes up the foreign DNA and, if desired, integrates it into its genome, depending on the expression vector used and the transfection technique used. To identify and select these integrants, a gene coding for a selectable marker (such as the ones described above) is usually introduced into the host cells together with the gene of interest. These markers can for example be used in mutants in which these genes are not functional by, for example, deletion by conventional methods. Furthermore, nucleic acid molecules encoding a selectable marker can be introduced into a host cell on the same vector that comprises the sequence encoding the polypeptides of the invention or used in the methods of the invention, or else in a separate vector. Cells which have been stably transfected with the introduced nucleic acid can be identified for example by selection (for example, cells which have integrated the selectable marker survive whereas the other cells die).

[0091] Since the marker genes, particularly genes for resistance to antibiotics and herbicides, are no longer required or are undesired in the transgenic host cell once the nucleic acids have been introduced successfully, the process according to the invention for introducing the nucleic acids advantageously employs techniques which enable the removal or excision of these marker genes. One such a method is what is known as co-transformation. The co-transformation method employs two vectors simultaneously for the transformation, one vector bearing the nucleic acid according to the invention and a second bearing the marker gene(s). A large proportion of transformants receives or, in the case of plants, comprises (up to 40% or more of the transformants), both vectors. In case of transformation with Agrobacteria, the transformants usually receive only a part of the vector, i.e. the sequence flanked by the T-DNA, which usually represents the expression cassette. The marker genes can subsequently be removed from the transformed plant by performing crosses. In another method, marker genes integrated into a transposon are used for the transformation together with desired nucleic acid (known as the Ac/Ds technology). The transformants can be crossed with a transposase source or the transformants are transformed with a nucleic acid construct conferring expression of a transposase, transiently or stable. In some cases (approx. 10%), the transposon jumps out of the genome of the host cell once transformation has taken place successfully and is lost. In a further number of cases, the transposon jumps to a different location. In these cases the marker gene must be eliminated by performing crosses. In microbiology, techniques were developed which make possible, or facilitate, the detection of such events. A further advantageous method relies on what is known as recombination systems; whose advantage is that elimination by crossing can be dispensed with. The best-known system of this type is what is known as the Cre/lox system. Cre1 is a recombinase that removes the sequences located between the loxP sequences. If the marker gene is integrated between the loxP sequences, it is removed once transformation has taken place successfully, by expression of the recombinase. Further recombination systems are the HIN/HIX, FLP/FRT and REP/STB system (Tribble et al., J. Biol. Chem., 275, 2000: 22255-22267; Velmurugan et al., J. Cell Biol., 149, 2000: 553-566). A site-specific integration into the plant genome of the nucleic acid sequences according to the invention is possible. Naturally, these methods can also be applied to microorganisms such as yeast, fungi or bacteria.

### Transgenic/Transgene/Recombinant

[0092] For the purposes of the invention, “transgenic”, “transgene” or “recombinant” means with regard to, for example, a nucleic acid sequence, an expression cassette, gene construct or a vector comprising the nucleic acid sequence or an organism transformed with the nucleic acid sequences, expression cassettes or vectors according to the invention, all those constructions brought about by recombinant methods in which either
[0093] (a) the nucleic acid sequences encoding proteins useful in the methods of the invention, or
[0094] (b) genetic control sequence(s) which is operably linked with the nucleic acid sequence according to the invention, for example a promoter, or
[0095] (c) a) and b)
   are not located in their natural genetic environment or have been modified by recombinant methods, it being possible for the modification to take the form of, for example, a substitution, addition, deletion, inversion or insertion of one or more nucleotide residues. The natural genetic environment is understood as meaning the natural genomic or chromosomal locus in the original plant or the presence in a genomic library. In the case of a genomic library, the natural genetic environment of the nucleic acid sequence is preferably retained, at least in part. The environment flanks the nucleic acid sequence at least on one side and has a sequence length of at least 50 bp, preferably at least 500 bp, especially preferably at least 1000 bp, most preferably at least 5000 bp. A naturally occurring expression cassette—for example the naturally occurring combination of the natural promoter of the nucleic acid sequences with the corresponding nucleic acid sequence encoding a polypeptide useful in the methods of the present invention, as defined above—becomes a transgenic expression cassette when this expression cassette is modified by non-natural, synthetic (“artificial”) methods such as, for example, mutagenic treatment. Suitable methods are described, for example, in U.S. Pat. No. 5,565,350 or WO 00/15815.

[0096] A transgenic plant for the purposes of the invention is thus understood as meaning, as above, that the nucleic acids used in the method of the invention are not present in, or originating from, the genome of said plant, or are present in the genome of said plant but not at their natural locus in the genome of said plant, it being possible for the nucleic acids to be expressed homologously or heterologously. However, as mentioned, transgenic also means that, while the nucleic acids according to the invention or used in the inventive method are at their natural position in the genome of a plant, the sequence has been modified with regard to the natural sequence, and/or that the regulatory sequences of the natural sequences have been modified. Transgenic is preferably understood as meaning the expression of the nucleic acids according to the invention at an unnatural locus in the genome, i.e. homologous or, preferably, heterologous expression of the nucleic acids takes place. Preferred transgenic plants are mentioned herein.

[0097] It shall further be noted that in the context of the present invention, the term “isolated nucleic acid” or “isolated polypeptide” may in some instances be considered as a synonym for a “recombinant nucleic acid” or a “recombinant polypeptide”, respectively and refers to a nucleic acid or polypeptide that is not located in its natural genetic environment and/or that has been modified by recombinant methods.

### Modulation

[0098] The term “modulation” means in relation to expression or gene expression, a process in which the expression level is changed by said gene expression in comparison to the control plant, the expression level may be increased or decreased. The original, unmodulated expression may be of any kind of expression of a structural RNA (rRNA, tRNA) or mRNA with subsequent translation. For the purposes of this invention, the original unmodulated expression may also be absence of any expression. The term “modulating the activity” shall mean any change of the expression of the inventive nucleic acid sequences or encoded proteins, which leads to increased yield and/or increased growth of the plants. The expression can increase from zero (absence of or immeasurable expression) to a certain amount, or can decrease from a certain amount to immeasurable small amounts or zero.

### Expression

[0099] The term “expression” or “gene expression” means the transcription of a specific gene or specific genes or specific genetic construct. The term “expression” or “gene expression” in particular means the transcription of a gene or genes or genetic construct into structural RNA (rRNA, tRNA) or mRNA with or without subsequent translation of the latter into a protein. The process includes transcription of DNA and processing of the resulting mRNA product.

### Increased Expression/Overexpression

[0100] The term “increased expression” or “overexpression” as used herein means any form of expression that is additional to the original wild-type expression level. For the purposes of this invention, the original wild-type expression level might also be zero ((absence of or immeasurable expression)).

[0101] Methods for increasing expression of genes or gene products are well documented in the art and include, for example, overexpression driven by appropriate promoters, the use of transcription enhancers or translation enhancers. Isolated nucleic acids which serve as promoter or enhancer elements may be introduced in an appropriate position (typically upstream) of a non-heterologous form of a polynucleotide so as to upregulate expression of a nucleic acid encoding the polypeptide of interest. For example, endogenous promoters may be altered in vivo by mutation, deletion, and/or substitution (see, Kmiec, U.S. Pat. No. 5,565,350; Zarling et al., WO9322443), or isolated promoters may be introduced into a plant cell in the proper orientation and distance from a gene of the present invention so as to control the expression of the gene.

[0102] If polypeptide expression is desired, it is generally desirable to include a polyadenylation region at the 3′-end of a polynucleotide coding region. The polyadenylation region can be derived from the natural gene, from a variety of other plant genes, or from T-DNA. The 3′ end sequence to be added may be derived from, for example, the nopaline synthase or octopine synthase genes, or alternatively from another plant gene, or less preferably from any other eukaryotic gene.

[0103] An intron sequence may also be added to the 5′ untranslated region (UTR) or the coding sequence of the partial coding sequence to increase the amount of the mature message that accumulates in the cytosol. Inclusion of a spliceable intron in the transcription unit in both plant and animal expression constructs has been shown to increase gene expression at both the mRNA and protein levels up to 1000-fold (Buchman and Berg (1988) Mol. Cell biol. 8: 4395-4405; Callis et al. (1987) Genes Dev 1:1183-1200). Such intron enhancement of gene expression is typically greatest when placed near the 5′ end of the transcription unit. Use of the maize introns Adh1-5 intron 1, 2, and 6, the Bronze-1 intron are known in the art. For general information see: The Maize Handbook, Chapter 116, Freeling and Walbot, Eds., Springer, N.Y. (1994).

### Decreased Expression

[0104] Reference herein to “decreased expression” or “reduction or substantial elimination” of expression is taken to mean a decrease in endogenous gene expression and/or polypeptide levels and/or polypeptide activity relative to control plants. The reduction or substantial elimination is in increasing order of preference at least 10%, 20%, 30%, 40% or 50%, 60%, 70%, 80%, 85%, 90%, or 95%, 96%, 97%, 98%, 99% or more reduced compared to that of control plants.

[0105] For the reduction or substantial elimination of expression an endogenous gene in a plant, a sufficient length of substantially contiguous nucleotides of a nucleic acid sequence is required. In order to perform gene silencing, this may be as little as 20, 19, 18, 17, 16, 15, 14, 13, 12, 11, 10 or fewer nucleotides, alternatively this may be as much as the entire gene (including the 5′ and/or 3′ UTR, either in part or in whole). The stretch of substantially contiguous nucleotides may be derived from the nucleic acid encoding the protein of interest (target gene), or from any nucleic acid capable of encoding an orthologue, paralogue or homologue of the protein of interest. Preferably, the stretch of substantially contiguous nucleotides is capable of forming hydrogen bonds with the target gene (either sense or antisense strand), more preferably, the stretch of substantially contiguous nucleotides has, in increasing order of preference, 50%, 60%, 70%, 80%, 85%, 90%, 95%, 96%, 97%, 98%, 99%, 100% sequence identity to the target gene (either sense or antisense strand). A nucleic acid sequence encoding a (functional) polypeptide is not a requirement for the various methods discussed herein for the reduction or substantial elimination of expression of an endogenous gene.

[0106] This reduction or substantial elimination of expression may be achieved using routine tools and techniques. A preferred method for the reduction or substantial elimination of endogenous gene expression is by introducing and expressing in a plant a genetic construct into which the nucleic acid (in this case a stretch of substantially contiguous nucleotides derived from the gene of interest, or from any nucleic acid capable of encoding an orthologue, paralogue or homologue of any one of the protein of interest) is cloned as an inverted repeat (in part or completely), separated by a spacer (non-coding DNA).

[0107] In such a preferred method, expression of the endogenous gene is reduced or substantially eliminated through RNA-mediated silencing using an inverted repeat of a nucleic acid or a part thereof (in this case a stretch of substantially contiguous nucleotides derived from the gene of interest, or from any nucleic acid capable of encoding an orthologue, paralogue or homologue of the protein of interest), preferably capable of forming a hairpin structure. The inverted repeat is cloned in an expression vector comprising control sequences. A non-coding DNA nucleic acid sequence (a spacer, for example a matrix attachment region fragment (MAR), an intron, a polylinker, etc.) is located between the two inverted nucleic acids forming the inverted repeat. After transcription of the inverted repeat, a chimeric RNA with a self-complementary structure is formed (partial or complete). This double-stranded RNA structure is referred to as the hairpin RNA (hpRNA). The hpRNA is processed by the plant into siRNAs that are incorporated into an RNA-induced silencing complex (RISC). The RISC further cleaves the mRNA transcripts, thereby substantially reducing the number of mRNA transcripts to be translated into polypeptides. For further general details see for example, Grierson et al. (1998) WO 98/53083; Waterhouse et al. (1999) WO 99/53050).

[0108] Performance of the methods of the invention does not rely on introducing and expressing in a plant a genetic construct into which the nucleic acid is cloned as an inverted repeat, but any one or more of several well-known “gene silencing” methods may be used to achieve the same effects.

[0109] One such method for the reduction of endogenous gene expression is RNA-mediated silencing of gene expression (downregulation). Silencing in this case is triggered in a plant by a double stranded RNA sequence (dsRNA) that is substantially similar to the target endogenous gene. This dsRNA is further processed by the plant into about 20 to about 26 nucleotides called short interfering RNAs (siRNAs). The siRNAs are incorporated into an RNA-induced silencing complex (RISC) that cleaves the mRNA transcript of the endogenous target gene, thereby substantially reducing the number of mRNA transcripts to be translated into a polypeptide. Preferably, the double stranded RNA sequence corresponds to a target gene.

[0110] Another example of an RNA silencing method involves the introduction of nucleic acid sequences or parts thereof (in this case a stretch of substantially contiguous nucleotides derived from the gene of interest, or from any nucleic acid capable of encoding an orthologue, paralogue or homologue of the protein of interest) in a sense orientation into a plant. “Sense orientation” refers to a DNA sequence that is homologous to an mRNA transcript thereof. Introduced into a plant would therefore be at least one copy of the nucleic acid sequence. The additional nucleic acid sequence will reduce expression of the endogenous gene, giving rise to a phenomenon known as co-suppression. The reduction of gene expression will be more pronounced if several additional copies of a nucleic acid sequence are introduced into the plant, as there is a positive correlation between high transcript levels and the triggering of co-suppression.

[0111] Another example of an RNA silencing method involves the use of antisense nucleic acid sequences. An “antisense” nucleic acid sequence comprises a nucleotide sequence that is complementary to a “sense” nucleic acid sequence encoding a protein, i.e. complementary to the coding strand of a double-stranded cDNA molecule or complementary to an mRNA transcript sequence. The antisense nucleic acid sequence is preferably complementary to the endogenous gene to be silenced. The complementarity may be located in the “coding region” and/or in the “non-coding region” of a gene. The term “coding region” refers to a region of the nucleotide sequence comprising codons that are translated into amino acid residues. The term “non-coding region” refers to 5′ and 3′ sequences that flank the coding region that are transcribed but not translated into amino acids (also referred to as 5′ and 3′ untranslated regions).

[0112] Antisense nucleic acid sequences can be designed according to the rules of Watson and Crick base pairing. The antisense nucleic acid sequence may be complementary to the entire nucleic acid sequence (in this case a stretch of substantially contiguous nucleotides derived from the gene of interest, or from any nucleic acid capable of encoding an orthologue, paralogue or homologue of the protein of interest), but may also be an oligonucleotide that is antisense to only a part of the nucleic acid sequence (including the mRNA 5′ and 3′ UTR). For example, the antisense oligonucleotide sequence may be complementary to the region surrounding the translation start site of an mRNA transcript encoding a polypeptide. The length of a suitable antisense oligonucleotide sequence is known in the art and may start from about 50, 45, 40, 35, 30, 25, 20, 15 or 10 nucleotides in length or less. An antisense nucleic acid sequence according to the invention may be constructed using chemical synthesis and enzymatic ligation reactions using methods known in the art. For example, an antisense nucleic acid sequence (e.g., an antisense oligonucleotide sequence) may be chemically synthesized using naturally occurring nucleotides or variously modified nucleotides designed to increase the biological stability of the molecules or to increase the physical stability of the duplex formed between the antisense and sense nucleic acid sequences, e.g., phosphorothioate derivatives and acridine substituted nucleotides may be used. Examples of modified nucleotides that may be used to generate the antisense nucleic acid sequences are well known in the art. Known nucleotide modifications include methylation, cyclization and ‘caps’ and substitution of one or more of the naturally occurring nucleotides with an analogue such as inosine. Other modifications of nucleotides are well known in the art.

[0113] The antisense nucleic acid sequence can be produced biologically using an expression vector into which a nucleic acid sequence has been subcloned in an antisense orientation (i.e., RNA transcribed from the inserted nucleic acid will be of an antisense orientation to a target nucleic acid of interest). Preferably, production of antisense nucleic acid sequences in plants occurs by means of a stably integrated nucleic acid construct comprising a promoter, an operably linked antisense oligonucleotide, and a terminator.

[0114] The nucleic acid molecules used for silencing in the methods of the invention (whether introduced into a plant or generated in situ) hybridize with or bind to mRNA transcripts and/or genomic DNA encoding a polypeptide to thereby inhibit expression of the protein, e.g., by inhibiting transcription and/or translation. The hybridization can be by conventional nucleotide complementarity to form a stable duplex, or, for example, in the case of an antisense nucleic acid sequence which binds to DNA duplexes, through specific interactions in the major groove of the double helix. Antisense nucleic acid sequences may be introduced into a plant by transformation or direct injection at a specific tissue site. Alternatively, antisense nucleic acid sequences can be modified to target selected cells and then administered systemically. For example, for systemic administration, antisense nucleic acid sequences can be modified such that they specifically bind to receptors or antigens expressed on a selected cell surface, e.g., by linking the antisense nucleic acid sequence to peptides or antibodies which bind to cell surface receptors or antigens. The antisense nucleic acid sequences can also be delivered to cells using the vectors described herein.

[0115] According to a further aspect, the antisense nucleic acid sequence is an a-anomeric nucleic acid sequence. An a-anomeric nucleic acid sequence forms specific double-stranded hybrids with complementary RNA in which, contrary to the usual b-units, the strands run parallel to each other (Gaultier et al. (1987) Nucl Ac Res 15: 6625-6641). The antisense nucleic acid sequence may also comprise a 2′-o-methylribonucleotide (Inoue et al. (1987) Nucl Ac Res 15, 6131-6148) or a chimeric RNA-DNA analogue (Inoue et al. (1987) FEBS Lett. 215, 327-330).

[0116] The reduction or substantial elimination of endogenous gene expression may also be performed using ribozymes. Ribozymes are catalytic RNA molecules with ribonuclease activity that are capable of cleaving a single-stranded nucleic acid sequence, such as an mRNA, to which they have a complementary region. Thus, ribozymes (e.g., hammerhead ribozymes (described in Haselhoff and Gerlach (1988) Nature 334, 585-591) can be used to catalytically cleave mRNA transcripts encoding a polypeptide, thereby substantially reducing the number of mRNA transcripts to be translated into a polypeptide. A ribozyme having specificity for a nucleic acid sequence can be designed (see for example: Cech et al. U.S. Pat. No. 4,987,071; and Cech et al. U.S. Pat. No. 5,116,742). Alternatively, mRNA transcripts corresponding to a nucleic acid sequence can be used to select a catalytic RNA having a specific ribonuclease activity from a pool of RNA molecules (Bartel and Szostak (1993) Science 261, 1411-1418).

[0117] The use of ribozymes for gene silencing in plants is known in the art (e.g., Atkins et al. (1994) WO 94/00012; Lenne et al. (1995) WO 95/03404; Lutziger et al. (2000) WO 00/00619; Prinsen et al. (1997) WO 97/13865 and Scott et al. (1997) WO 97/38116).

[0118] Gene silencing may also be achieved by insertion mutagenesis (for example, T-DNA insertion or transposon insertion) or by strategies as described by, among others, Angell and Baulcombe ((1999) Plant J 20(3): 357-62), (Amplicon VIGS WO 98/36083), or Baulcombe (WO 99/15682).

[0119] Gene silencing may also occur if there is a mutation on an endogenous gene and/or a mutation on an isolated gene/nucleic acid subsequently introduced into a plant. The reduction or substantial elimination may be caused by a non-functional polypeptide. For example, the polypeptide may bind to various interacting proteins; one or more mutation(s) and/or truncation(s) may therefore provide for a polypeptide that is still able to bind interacting proteins (such as receptor proteins) but that cannot exhibit its normal function (such as signalling ligand).

[0120] A further approach to gene silencing is by targeting nucleic acid sequences complementary to the regulatory region of the gene (e.g., the promoter and/or enhancers) to form triple helical structures that prevent transcription of the gene in target cells. See Helene, C., Anticancer Drug Res. 6, 569-84, 1991; Helene et al., Ann. N.Y. Acad. Sci. 660, 27-36 1992; and Maher, L. J. Bioassays 14, 807-15, 1992.

[0121] Other methods, such as the use of antibodies directed to an endogenous polypeptide for inhibiting its function in planta, or interference in the signalling pathway in which a polypeptide is involved, will be well known to the skilled man. In particular, it can be envisaged that manmade molecules may be useful for inhibiting the biological function of a target polypeptide, or for interfering with the signalling pathway in which the target polypeptide is involved.

[0122] Alternatively, a screening program may be set up to identify in a plant population natural variants of a gene, which variants encode polypeptides with reduced activity. Such natural variants may also be used for example, to perform homologous recombination.

[0123] Artificial and/or natural microRNAs (miRNAs) may be used to knock out gene expression and/or mRNA translation. Endogenous miRNAs are single stranded small RNAs of typically 19-24 nucleotides long. They function primarily to regulate gene expression and/or mRNA translation. Most plant microRNAs (miRNAs) have perfect or near-perfect complementarity with their target sequences. However, there are natural targets with up to five mismatches. They are processed from longer non-coding RNAs with characteristic fold-back structures by double-strand specific RNases of the Dicer family. Upon processing, they are incorporated in the RNA-induced silencing complex (RISC) by binding to its main component, an Argonaute protein. MiRNAs serve as the specificity components of RISC, since they base-pair to target nucleic acids, mostly mRNAs, in the cytoplasm. Subsequent regulatory events include target mRNA cleavage and destruction and/or translational inhibition. Effects of miRNA overexpression are thus often reflected in decreased mRNA levels of target genes.

[0124] Artificial microRNAs (amiRNAs), which are typically 21 nucleotides in length, can be genetically engineered specifically to negatively regulate gene expression of single or multiple genes of interest. Determinants of plant microRNA target selection are well known in the art. Empirical parameters for target recognition have been defined and can be used to aid in the design of specific amiRNAs, (Schwab et al., Dev. Cell 8, 517-527, 2005). Convenient tools for design and generation of amiRNAs and their precursors are also available to the public (Schwab et al., Plant Cell 18, 1121-1133, 2006).

[0125] For optimal performance, the gene silencing techniques used for reducing expression in a plant of an endogenous gene requires the use of nucleic acid sequences from monocotyledonous plants for transformation of monocotyledonous plants, and from dicotyledonous plants for transformation of dicotyledonous plants. Preferably, a nucleic acid sequence from any given plant species is introduced into that same species. For example, a nucleic acid sequence from rice is transformed into a rice plant. However, it is not an absolute requirement that the nucleic acid sequence to be introduced originates from the same plant species as the plant in which it will be introduced. It is sufficient that there is substantial homology between the endogenous target gene and the nucleic acid to be introduced.

[0126] Described above are examples of various methods for the reduction or substantial elimination of expression in a plant of an endogenous gene. A person skilled in the art would readily be able to adapt the aforementioned methods for silencing so as to achieve reduction of expression of an endogenous gene in a whole plant or in parts thereof through the use of an appropriate promoter, for example.

### Transformation

[0127] The term “introduction” or “transformation” as referred to herein encompasses the transfer of an exogenous polynucleotide into a host cell, irrespective of the method used for transfer. Plant tissue capable of subsequent clonal propagation, whether by organogenesis or embryogenesis, may be transformed with a genetic construct of the present invention and a whole plant regenerated there from. The particular tissue chosen will vary depending on the clonal propagation systems available for, and best suited to, the particular species being transformed. Exemplary tissue targets include leaf disks, pollen, embryos, cotyledons, hypocotyls, megagametophytes, callus tissue, existing meristematic tissue (e.g., apical meristem, axillary buds, and root meristems), and induced meristem tissue (e.g., cotyledon meristem and hypocotyl meristem). The polynucleotide may be transiently or stably introduced into a host cell and may be maintained non-integrated, for example, as a plasmid. Alternatively, it may be integrated into the host genome. The resulting transformed plant cell may then be used to regenerate a transformed plant in a manner known to persons skilled in the art.

[0128] The transfer of foreign genes into the genome of a plant is called transformation. Transformation of plant species is now a fairly routine technique. Advantageously, any of several transformation methods may be used to introduce the gene of interest into a suitable ancestor cell. The methods described for the transformation and regeneration of plants from plant tissues or plant cells may be utilized for transient or for stable transformation. Transformation methods include the use of liposomes, electroporation, chemicals that increase free DNA uptake, injection of the DNA directly into the plant, particle gun bombardment, transformation using viruses or pollen and microprojection. Methods may be selected from the calcium/polyethylene glycol method for protoplasts (Krens, F. A. et al., (1982) Nature 296, 72-74; Negrutiu I et al. (1987) Plant Mol Biol 8: 363-373); electroporation of protoplasts (Shillito R. D. et al. (1985) Bio/Technol 3, 1099-1102); microinjection into plant material (Crossway A et al., (1986) Mol. Gen Genet 202: 179-185); DNA or RNA-coated particle bombardment (Klein T M et al., (1987) Nature 327: 70) infection with (non-integrative) viruses and the like. Transgenic plants, including transgenic crop plants, are preferably produced via Agrobacterium-mediated transformation. An advantageous transformation method is the transformation in planta. To this end, it is possible, for example, to allow the agrobacteria to act on plant seeds or to inoculate the plant meristem with agrobacteria. It has proved particularly expedient in accordance with the invention to allow a suspension of transformed agrobacteria to act on the intact plant or at least on the flower primordia. The plant is subsequently grown on until the seeds of the treated plant are obtained (Clough and Bent, Plant J. (1998) 16, 735-743). Methods for Agrobacterium-mediated transformation of rice include well known methods for rice transformation, such as those described in any of the following: European patent application EP 1198985 A1, Aldemita and Hodges (Planta 199: 612-617, 1996); Chan et al. (Plant Mol Biol 22 (3): 491-506, 1993), Hiei et al. (Plant J 6 (2): 271-282, 1994), which disclosures are incorporated by reference herein as if fully set forth. In the case of corn transformation, the preferred method is as described in either Ishida et al. (Nat. Biotechnol 14(6): 745-50, 1996) or Frame et al. (Plant Physiol 129(1): 13-22, 2002), which disclosures are incorporated by reference herein as if fully set forth. Said methods are further described by way of example in B. Jenes et al., Techniques for Gene Transfer, in: Transgenic Plants, Vol. 1, Engineering and Utilization, eds. S. D. Kung and R. Wu, Academic Press (1993) 128-143 and in Potrykus Annu. Rev. Plant Physiol. Plant Molec. Biol. 42 (1991) 205-225). The nucleic acids or the construct to be expressed is preferably cloned into a vector, which is suitable for transforming Agrobacterium tumefaciens, for example pBin19 (Bevan et al., Nucl. Acids Res. 12 (1984) 8711). Agrobacteria transformed by such a vector can then be used in known manner for the transformation of plants, such as plants used as a model, like Arabidopsis (Arabidopsis thaliana is within the scope of the present invention not considered as a crop plant), or crop plants such as, by way of example, tobacco plants, for example by immersing bruised leaves or chopped leaves in an agrobacterial solution and then culturing them in suitable media. The transformation of plants by means of Agrobacterium tumefaciens is described, for example, by Höfgen and Willmitzer in Nucl. Acid Res. (1988) 16, 9877 or is known inter alia from F. F. White, Vectors for Gene Transfer in Higher Plants; in Transgenic Plants, Vol. 1, Engineering and Utilization, eds. S. D. Kung and R. Wu, Academic Press, 1993, pp. 15-38.

[0129] In addition to the transformation of somatic cells, which then have to be regenerated into intact plants, it is also possible to transform the cells of plant meristems and in particular those cells which develop into gametes. In this case, the transformed gametes follow the natural plant development, giving rise to transgenic plants. Thus, for example, seeds of Arabidopsis are treated with agrobacteria and seeds are obtained from the developing plants of which a certain proportion is transformed and thus transgenic [Feldman, K A and Marks M D (1987). Mol Gen Genet 208:1-9; Feldmann K (1992). In: C Koncz, N-H Chua and J Shell, eds, Methods in Arabidopsis Research. Word Scientific, Singapore, pp. 274-289]. Alternative methods are based on the repeated removal of the inflorescences and incubation of the excision site in the center of the rosette with transformed agrobacteria, whereby transformed seeds can likewise be obtained at a later point in time (Chang (1994). Plant J. 5: 551-558; Katavic (1994). Mol Gen Genet, 245: 363-370). However, an especially effective method is the vacuum infiltration method with its modifications such as the “floral dip” method. In the case of vacuum infiltration of Arabidopsis, intact plants under reduced pressure are treated with an agrobacterial suspension [Bechthold, N (1993). C R Acad Sci Paris Life Sci, 316: 1194-1199], while in the case of the “floral dip” method the developing floral tissue is incubated briefly with a surfactant-treated agrobacterial suspension [Clough, S J and Bent A F (1998) The Plant J. 16, 735-743]. A certain proportion of transgenic seeds are harvested in both cases, and these seeds can be distinguished from non-transgenic seeds by growing under the above-described selective conditions. In addition the stable transformation of plastids is of advantages because plastids are inherited maternally is most crops reducing or eliminating the risk of transgene flow through pollen. The transformation of the chloroplast genome is generally achieved by a process which has been schematically displayed in Klaus et al., 2004 [Nature Biotechnology 22 (2), 225-229]. Briefly the sequences to be transformed are cloned together with a selectable marker gene between flanking sequences homologous to the chloroplast genome. These homologous flanking sequences direct site specific integration into the plastome. Plastidal transformation has been described for many different plant species and an overview is given in Bock (2001) Transgenic plastids in basic research and plant biotechnology. J Mol Biol. 2001 Sep. 21; 312 (3):425-38 or Maliga, P (2003) Progress towards commercialization of plastid transformation technology. Trends Biotechnol. 21, 20-28. Further biotechnological progress has recently been reported in form of marker free plastid transformants, which can be produced by a transient co-integrated maker gene (Klaus et al., 2004, Nature Biotechnology 22(2), 225-229).

[0130] The genetically modified plant cells can be regenerated via all methods with which the skilled worker is familiar. Suitable methods can be found in the abovementioned publications by S. D. Kung and R. Wu, Potrykus or Hofgen and Willmitzer.

[0131] Generally after transformation, plant cells or cell groupings are selected for the presence of one or more markers which are encoded by plant-expressible genes co-transferred with the gene of interest, following which the transformed material is regenerated into a whole plant. To select transformed plants, the plant material obtained in the transformation is, as a rule, subjected to selective conditions so that transformed plants can be distinguished from untransformed plants. For example, the seeds obtained in the above-described manner can be planted and, after an initial growing period, subjected to a suitable selection by spraying. A further possibility consists in growing the seeds, if appropriate after sterilization, on agar plates using a suitable selection agent so that only the transformed seeds can grow into plants. Alternatively, the transformed plants are screened for the presence of a selectable marker such as the ones described above.

[0132] Following DNA transfer and regeneration, putatively transformed plants may also be evaluated, for instance using Southern analysis, for the presence of the gene of interest, copy number and/or genomic organisation. Alternatively or additionally, expression levels of the newly introduced DNA may be monitored using Northern and/or Western analysis, both techniques being well known to persons having ordinary skill in the art.

[0133] The generated transformed plants may be propagated by a variety of means, such as by clonal propagation or classical breeding techniques. For example, a first generation (or T1) transformed plant may be selfed and homozygous second-generation (or T2) transformants selected, and the T2 plants may then further be propagated through classical breeding techniques. The generated transformed organisms may take a variety of forms. For example, they may be chimeras of transformed cells and non-transformed cells; clonal transformants (e.g., all cells transformed to contain the expression cassette); grafts of transformed and untransformed tissues (e.g., in plants, a transformed rootstock grafted to an untransformed scion).

### T-DNA Activation Tagging

[0134] T-DNA activation tagging (Hayashi et al. Science (1992) 1350-1353), involves insertion of T-DNA, usually containing a promoter (may also be a translation enhancer or an intron), in the genomic region of the gene of interest or 10 kb up- or downstream of the coding region of a gene in a configuration such that the promoter directs expression of the targeted gene. Typically, regulation of expression of the targeted gene by its natural promoter is disrupted and the gene falls under the control of the newly introduced promoter. The promoter is typically embedded in a T-DNA. This T-DNA is randomly inserted into the plant genome, for example, through Agrobacterium infection and leads to modified expression of genes near the inserted T-DNA. The resulting transgenic plants show dominant phenotypes due to modified expression of genes close to the introduced promoter.

### TILLING

[0135] The term “TILLING” is an abbreviation of “Targeted Induced Local Lesions In Genomes” and refers to a mutagenesis technology useful to generate and/or identify nucleic acids encoding proteins with modified expression and/or activity. TILLING also allows selection of plants carrying such mutant variants. These mutant variants may exhibit modified expression, either in strength or in location or in timing (if the mutations affect the promoter for example). These mutant variants may exhibit higher activity than that exhibited by the gene in its natural form. TILLING combines high-density mutagenesis with high-throughput screening methods. The steps typically followed in TILLING are: (a) EMS mutagenesis (Redei G P and Koncz C (1992) In Methods in Arabidopsis Research, Koncz C, Chua N H, Schell J, eds. Singapore, World Scientific Publishing Co, pp. 16-82; Feldmann et al., (1994) In Meyerowitz E M, Somerville C R, eds, Arabidopsis. Cold Spring Harbor Laboratory Press, Cold Spring Harbor, N.Y., pp 137-172; Lightner J and Caspar T (1998) In J Martinez-Zapater, J Salinas, eds, Methods on Molecular Biology, Vol. 82. Humana Press, Totowa, N.J., pp 91-104); (b) DNA preparation and pooling of individuals; (c) PCR amplification of a region of interest; (d) denaturation and annealing to allow formation of heteroduplexes; (e) DHPLC, where the presence of a heteroduplex in a pool is detected as an extra peak in the chromatogram; (f) identification of the mutant individual; and (g) sequencing of the mutant PCR product. Methods for TILLING are well known in the art (McCallum et al., (2000) Nat Biotechnol 18: 455-457; reviewed by Stemple (2004) Nat Rev Genet 5(2): 145-50).

### Homologous Recombination

[0136] Homologous recombination allows introduction in a genome of a selected nucleic acid at a defined selected position. Homologous recombination is a standard technology used routinely in biological sciences for lower organisms such as yeast or the moss Physcomitrella. Methods for performing homologous recombination in plants have been described not only for model plants (Offringa et al. (1990) EMBO J 9(10): 3077-84) but also for crop plants, for example rice (Terada et al. (2002) Nat Biotech 20(10): 1030-4; lida and Terada (2004) Curr Opin Biotech 15(2): 132-8), and approaches exist that are generally applicable regardless of the target organism (Miller et al, Nature Biotechnol. 25, 778-785, 2007).

### Yield Related Traits

[0137] Yield related traits comprise one or more of early flowering time, yield, biomass, seed yield, early vigour, greenness index, increased growth rate, improved agronomic traits (such as improved Water Use Efficiency (WUE), Nitrogen Use Efficiency (NUE), etc.).

### Yield

[0138] The term “yield” in general means a measurable produce of economic value, typically related to a specified crop, to an area, and to a period of time. Individual plant parts directly contribute to yield based on their number, size and/or weight, or the actual yield is the yield per square meter for a crop and year, which is determined by dividing total production (includes both harvested and appraised production) by planted square meters. The terms “yield” of a plant and “plant yield” are used interchangeably herein and are meant to refer to vegetative biomass such as root and/or shoot biomass, to reproductive organs, and/or to propagules such as seeds of that plant.

[0139] Taking corn as an example, a yield increase may be manifested as one or more of the following: increase in the number of plants established per square meter, an increase in the number of ears per plant, an increase in the number of rows, number of kernels per row, kernel weight, thousand kernel weight, ear length/diameter, increase in the seed filling rate (which is the number of filled seeds divided by the total number of seeds and multiplied by 100), among others. Taking rice as an example, a yield increase may manifest itself as an increase in one or more of the following: number of plants per square meter, number of panicles per plant, panicle length, number of spikelets per panicle, number of flowers (florets) per panicle, increase in the seed filling rate (which is the number of filled seeds divided by the total number of seeds and multiplied by 100), increase in thousand kernel weight, among others. In rice, submergence tolerance may also result in increased yield.

### Early Flowering Time

[0140] Plants having an “early flowering time” as used herein are plants which start to flower earlier than control plants. Hence this term refers to plants that show an earlier start of flowering. Flowering time of plants can be assessed by counting the number of days (“time to flower”) between sowing and the emergence of a first inflorescence. The “flowering time” of a plant can for instance be determined using the method as described in WO 2007/093444.

### Early Vigour

[0141] “Early vigour” refers to active healthy well-balanced growth especially during early stages of plant growth, and may result from increased plant fitness due to, for example, the plants being better adapted to their environment (i.e. optimizing the use of energy resources and partitioning between shoot and root). Plants having early vigour also show increased seedling survival and a better establishment of the crop, which often results in highly uniform fields (with the crop growing in uniform manner, i.e. with the majority of plants reaching the various stages of development at substantially the same time), and often better and higher yield. Therefore, early vigour may be determined by measuring various factors, such as thousand kernel weight, percentage germination, percentage emergence, seedling growth, seedling height, root length, root and shoot biomass and many more.

### Increased Growth Rate

[0142] The increased growth rate may be specific to one or more parts of a plant (including seeds), or may be throughout substantially the whole plant. Plants having an increased growth rate may have a shorter life cycle. The life cycle of a plant may be taken to mean the time needed to grow from a dry mature seed up to the stage where the plant has produced dry mature seeds, similar to the starting material. This life cycle may be influenced by factors such as speed of germination, early vigour, growth rate, greenness index, flowering time and speed of seed maturation. The increase in growth rate may take place at one or more stages in the life cycle of a plant or during substantially the whole plant life cycle. Increased growth rate during the early stages in the life cycle of a plant may reflect enhanced vigour. The increase in growth rate may alter the harvest cycle of a plant allowing plants to be sown later and/or harvested sooner than would otherwise be possible (a similar effect may be obtained with earlier flowering time). If the growth rate is sufficiently increased, it may allow for the further sowing of seeds of the same plant species (for example sowing and harvesting of rice plants followed by sowing and harvesting of further rice plants all within one conventional growing period). Similarly, if the growth rate is sufficiently increased, it may allow for the further sowing of seeds of different plants species (for example the sowing and harvesting of corn plants followed by, for example, the sowing and optional harvesting of soybean, potato or any other suitable plant). Harvesting additional times from the same rootstock in the case of some crop plants may also be possible. Altering the harvest cycle of a plant may lead to an increase in annual biomass production per square meter (due to an increase in the number of times (say in a year) that any particular plant may be grown and harvested). An increase in growth rate may also allow for the cultivation of transgenic plants in a wider geographical area than their wild-type counterparts, since the territorial limitations for growing a crop are often determined by adverse environmental conditions either at the time of planting (early season) or at the time of harvesting (late season). Such adverse conditions may be avoided if the harvest cycle is shortened. The growth rate may be determined by deriving various parameters from growth curves, such parameters may be: T-Mid (the time taken for plants to reach 50% of their maximal size) and T-90 (time taken for plants to reach 90% of their maximal size), amongst others.

### Stress Resistance

[0143] An increase in yield and/or growth rate occurs whether the plant is under non-stress conditions or whether the plant is exposed to various stresses compared to control plants. Plants typically respond to exposure to stress by growing more slowly. In conditions of severe stress, the plant may even stop growing altogether. Mild stress on the other hand is defined herein as being any stress to which a plant is exposed which does not result in the plant ceasing to grow altogether without the capacity to resume growth. Mild stress in the sense of the invention leads to a reduction in the growth of the stressed plants of less than 40%, 35%, 30% or 25%, more preferably less than 20% or 15% in comparison to the control plant under non-stress conditions. Due to advances in agricultural practices (irrigation, fertilization, pesticide treatments) severe stresses are not often encountered in cultivated crop plants. As a consequence, the compromised growth induced by mild stress is often an undesirable feature for agriculture. “Mild stresses” are the everyday biotic and/or abiotic (environmental) stresses to which a plant is exposed. Abiotic stresses may be due to drought or excess water, anaerobic stress, salt stress, chemical toxicity, oxidative stress and hot, cold or freezing temperatures.

[0144] “Biotic stresses” are typically those stresses caused by pathogens, such as bacteria, viruses, fungi, nematodes and insects.

[0145] The “abiotic stress” may be an osmotic stress caused by a water stress, e.g. due to drought, salt stress, or freezing stress. Abiotic stress may also be an oxidative stress or a cold stress. “Freezing stress” is intended to refer to stress due to freezing temperatures, i.e. temperatures at which available water molecules freeze and turn into ice. “Cold stress”, also called “chilling stress”, is intended to refer to cold temperatures, e.g. temperatures below 10°, or preferably below 5° C., but at which water molecules do not freeze. As reported in Wang et al. (Planta (2003) 218: 1-14), abiotic stress leads to a series of morphological, physiological, biochemical and molecular changes that adversely affect plant growth and productivity. Drought, salinity, extreme temperatures and oxidative stress are known to be interconnected and may induce growth and cellular damage through similar mechanisms. Rabbani et al. (Plant Physiol (2003) 133: 1755-1767) describes a particularly high degree of “cross talk” between drought stress and high-salinity stress. For example, drought and/or salinisation are manifested primarily as osmotic stress, resulting in the disruption of homeostasis and ion distribution in the cell. Oxidative stress, which frequently accompanies high or low temperature, salinity or drought stress, may cause denaturing of functional and structural proteins. As a consequence, these diverse environmental stresses often activate similar cell signalling pathways and cellular responses, such as the production of stress proteins, up-regulation of anti-oxidants, accumulation of compatible solutes and growth arrest. The term “non-stress” conditions as used herein are those environmental conditions that allow optimal growth of plants. Persons skilled in the art are aware of normal soil conditions and climatic conditions for a given location. Plants with optimal growth conditions, (grown under non-stress conditions) typically yield in increasing order of preference at least 97%, 95%, 92%, 90%, 87%, 85%, 83%, 80%, 77% or 75% of the average production of such plant in a given environment. Average production may be calculated on harvest and/or season basis. Persons skilled in the art are aware of average yield productions of a crop.

[0146] In particular, the methods of the present invention may be performed under non-stress conditions. In an example, the methods of the present invention may be performed under non-stress conditions such as mild drought to give plants having increased yield relative to control plants.

[0147] In another embodiment, the methods of the present invention may be performed under stress conditions.

[0148] In an example, the methods of the present invention may be performed under stress conditions such as drought to give plants having increased yield relative to control plants.

[0149] In another example, the methods of the present invention may be performed under stress conditions such as nutrient deficiency to give plants having increased yield relative to control plants.

[0150] Nutrient deficiency may result from a lack of nutrients such as nitrogen, phosphates and other phosphorous-containing compounds, potassium, calcium, magnesium, manganese, iron and boron, amongst others.

[0151] In yet another example, the methods of the present invention may be performed under stress conditions such as salt stress to give plants having increased yield relative to control plants. The term salt stress is not restricted to common salt (NaCl), but may be any one or more of: NaCl, KCl, LiCl, MgCl₂, CaCl₂, amongst others.

[0152] In yet another example, the methods of the present invention may be performed under stress conditions such as cold stress or freezing stress to give plants having increased yield relative to control plants.

### Increase/Improve/Enhance

[0153] The terms “increase”, “improve” or “enhance” are interchangeable and shall mean in the sense of the application at least a 3%, 4%, 5%, 6%, 7%, 8%, 9% or 10%, preferably at least 15% or 20%, more preferably 25%, 30%, 35% or 40% more yield and/or growth in comparison to control plants as defined herein.

### Seed Yield

[0154] Increased seed yield may manifest itself as one or more of the following:
[0155] (a) an increase in seed biomass (total seed weight) which may be on an individual seed basis and/or per plant and/or per square meter;
[0156] (b) increased number of flowers per plant;
[0157] (c) increased number of seeds and/or increased number of filled seeds;
[0158] (d) increased seed filling rate (which is expressed as the ratio between the number of filled seeds divided by the total number of seeds);
[0159] (e) increased harvest index, which is expressed as a ratio of the yield of harvestable parts, such as seeds, divided by the biomass of aboveground plant parts; and
[0160] (f) increased thousand kernel weight (TKW), which is extrapolated from the number of filled seeds counted and their total weight. An increased TKW may result from an increased seed size and/or seed weight, and may also result from an increase in embryo and/or endosperm size.

[0161] An increase in seed yield may also be manifested as an increase in seed size and/or seed volume. Furthermore, an increase in seed yield may also manifest itself as an increase in seed area and/or seed length and/or seed width and/or seed perimeter.

### Greenness Index

[0162] The “greenness index” as used herein is calculated from digital images of plants. For each pixel belonging to the plant object on the image, the ratio of the green value versus the red value (in the RGB model for encoding color) is calculated. The greenness index is expressed as the percentage of pixels for which the green-to-red ratio exceeds a given threshold. Under normal growth conditions, under salt stress growth conditions, and under reduced nutrient availability growth conditions, the greenness index of plants is measured in the last imaging before flowering. In contrast, under drought stress growth conditions, the greenness index of plants is measured in the first imaging after drought.

### Biomass

[0163] The term “biomass” as used herein is intended to refer to the total weight of a plant. Within the definition of biomass, a distinction may be made between the biomass of one or more parts of a plant, which may include:
[0164] aboveground (harvestable) parts such as but not limited to shoot biomass, seed biomass, leaf biomass, etc. and/or
[0165] (harvestable) parts below ground, such as but not limited to root biomass, etc., and/or
[0166] vegetative biomass such as root biomass, shoot biomass, etc., and/or
[0167] reproductive organs, and/or
[0168] propagules such as seed.

### Marker Assisted Breeding

[0169] Such breeding programmes sometimes require introduction of allelic variation by mutagenic treatment of the plants, using for example EMS mutagenesis; alternatively, the programme may start with a collection of allelic variants of so called “natural” origin caused unintentionally. Identification of allelic variants then takes place, for example, by PCR. This is followed by a step for selection of superior allelic variants of the sequence in question and which give increased yield. Selection is typically carried out by monitoring growth performance of plants containing different allelic variants of the sequence in question. Growth performance may be monitored in a greenhouse or in the field. Further optional steps include crossing plants in which the superior allelic variant was identified with another plant. This could be used, for example, to make a combination of interesting phenotypic features.

### Use as Probes in (Gene Mapping)

[0170] Use of nucleic acids encoding the protein of interest for genetically and physically mapping the genes requires only a nucleic acid sequence of at least 15 nucleotides in length. These nucleic acids may be used as restriction fragment length polymorphism (RFLP) markers. Southern blots (Sambrook J, Fritsch E F and Maniatis T (1989) Molecular Cloning, A Laboratory Manual) of restriction-digested plant genomic DNA may be probed with the nucleic acids encoding the protein of interest. The resulting banding patterns may then be subjected to genetic analyses using computer programs such as MapMaker (Lander et al. (1987) Genomics 1: 174-181) in order to construct a genetic map. In addition, the nucleic acids may be used to probe Southern blots containing restriction endonuclease-treated genomic DNAs of a set of individuals representing parent and progeny of a defined genetic cross. Segregation of the DNA polymorphisms is noted and used to calculate the position of the nucleic acid encoding the protein of interest in the genetic map previously obtained using this population (Botstein et al. (1980) Am. J. Hum. Genet. 32:314-331).

[0171] The production and use of plant gene-derived probes for use in genetic mapping is described in Bernatzky and Tanksley (1986) Plant Mol. Biol. Reporter 4: 37-41. Numerous publications describe genetic mapping of specific cDNA clones using the methodology outlined above or variations thereof. For example, F2 intercross populations, backcross populations, randomly mated populations, near isogenic lines, and other sets of individuals may be used for mapping. Such methodologies are well known to those skilled in the art.

[0172] The nucleic acid probes may also be used for physical mapping (i.e., placement of sequences on physical maps; see Hoheisel et al. In: Non-mammalian Genomic Analysis: A Practical Guide, Academic press 1996, pp. 319-346, and references cited therein).

[0173] In another embodiment, the nucleic acid probes may be used in direct fluorescence in situ hybridisation (FISH) mapping (Trask (1991) Trends Genet. 7:149-154). Although current methods of FISH mapping favour use of large clones (several kb to several hundred kb; see Laan et al. (1995) Genome Res. 5:13-20), improvements in sensitivity may allow performance of FISH mapping using shorter probes.

[0174] A variety of nucleic acid amplification-based methods for genetic and physical mapping may be carried out using the nucleic acids. Examples include allele-specific amplification (Kazazian (1989) J. Lab. Clin. Med 11:95-96), polymorphism of PCR-amplified fragments (CAPS; Sheffield et al. (1993) Genomics 16:325-332), allele-specific ligation (Landegren et al. (1988) Science 241:1077-1080), nucleotide extension reactions (Sokolov (1990) Nucleic Acid Res. 18:3671), Radiation Hybrid Mapping (Walter et al. (1997) Nat. Genet. 7:22-28) and Happy Mapping (Dear and Cook (1989) Nucleic Acid Res. 17:6795-6807). For these methods, the sequence of a nucleic acid is used to design and produce primer pairs for use in the amplification reaction or in primer extension reactions. The design of such primers is well known to those skilled in the art. In methods employing PCR-based genetic mapping, it may be necessary to identify DNA sequence differences between the parents of the mapping cross in the region corresponding to the instant nucleic acid sequence. This, however, is generally not necessary for mapping methods.

### Plant

[0175] The term “plant” as used herein encompasses whole plants, ancestors and progeny of the plants and plant parts, including seeds, shoots, stems, leaves, roots (including tubers), flowers, and tissues and organs, wherein each of the aforementioned comprise the gene/nucleic acid of interest. The term “plant” also encompasses plant cells, suspension cultures, callus tissue, embryos, meristematic regions, gametophytes, sporophytes, pollen and microspores, again wherein each of the aforementioned comprises the gene/nucleic acid of interest.

[0176] Plants that are particularly useful in the methods of the invention include all plants which belong to the superfamily Viridiplantae, in particular monocotyledonous and dicotyledonous plants including fodder or forage legumes, ornamental plants, food crops, trees or shrubs selected from the list comprising Acer spp., Actinidia spp., Abelmoschus spp., Agave sisalana, Agropyron spp., Agrostis stolonifera, Allium spp., Amaranthus spp., Ammophila arenaria, Ananas comosus, Annona spp., Apium graveolens, Arachis spp, Artocarpus spp., Asparagus officinalis, Avena spp. (e.g. Avena sativa, Avena fatua, Avena byzantina, Avena fatua var. sativa, Avena hybrida), A verrhoa carambola, Bambusa sp., Benincasa hispida, Bertholletia excelsea, Beta vulgaris, Brassica spp. (e.g. Brassica napus, Brassica rapa ssp. [canola, oilseed rape, turnip rape]), Cadaba farinosa, Camellia sinensis, Canna indica, Cannabis sativa, Capsicum spp., Carex elata, Carica papaya, Carissa macrocarpa, Carya spp., Carthamus tinctorius, Castanea spp., Ceiba pentandra, Cichorium endivia, Cinnamomum spp., Citrullus lanatus, Citrus spp., Cocos spp., Coffea spp., Colocasia esculenta, Cola spp., Corchorus sp., Coriandrum sativum, Corylus spp., Crataegus spp., Crocus sativus, Cucurbita spp., Cucumis spp., Cynara spp., Daucus carota, Desmodium spp., Dimocarpus longan, Dioscorea spp., Diospyros spp., Echinochloa spp., Elaeis (e.g. Elaeis guineensis, Elaeis oleifera), Eleusine coracana, Eragrostis tef, Erianthus sp., Eriobotrya japonica, Eucalyptus sp., Eugenia uniflora, Fagopyrum spp., Fagus spp., Festuca arundinacea, Ficus carica, Fortunella spp., Fragaria spp., Ginkgo biloba, Glycine spp. (e.g. Glycine max, Soja hispida or Soja max), Gossypium hirsutum, Helianthus spp. (e.g. Helianthus annuus), Hemerocallis fulva, Hibiscus spp., Hordeum spp. (e.g. Hordeum vulgare), Ipomoea batatas, Juglans spp., Lactuca sativa, Lathyrus spp., Lens culinaris, Linum usitatissimum, Litchi chinensis, Lotus spp., Luffa acutangula, Lupinus spp., Luzula sylvatica, Lycopersicon spp. (e.g. Lycopersicon esculentum, Lycopersicon lycopersicum, Lycopersicon pyriforme), Macrotyloma spp., Malus spp., Malpighia emarginata, Mammea americana, Mangifera indica, Manihot spp., Manilkara zapota, Medicago sativa, Melilotus spp., Mentha spp., Miscanthus sinensis, Momordica spp., Morus nigra, Musa spp., Nicotiana spp., Olea spp., Opuntia spp., Ornithopus spp., Oryza spp. (e.g. Oryza sativa, Oryza latifolia), Panicum miliaceum, Panicum virgatum, Passiflora edulis, Pastinaca sativa, Pennisetum sp., Persea spp., Petroselinum crispum, Phalaris arundinacea, Phaseolus spp., Phleum pratense, Phoenix spp., Phragmites australis, Physalis spp., Pinus spp., Pistacia vera, Pisum spp., Poa spp., Populus spp., Prosopis spp., Prunus spp., Psidium spp., Punica granatum, Pyrus communis, Quercus spp., Raphanus sativus, Rheum rhabarbarum, Ribes spp., Ricinus communis, Rubus spp., Saccharum spp., Salix sp., Sambucus spp., Secale cereale, Sesamum spp., Sinapis sp., Solanum spp. (e.g. Solanum tuberosum, Solanum integrifolium or Solanum lycopersicum), Sorghum bicolor, Spinacia spp., Syzygium spp., Tagetes spp., Tamarindus indica, Theobroma cacao, Trifolium spp., Tripsacum dactyloides, Triticosecale rimpaui, Triticum spp. (e.g. Triticum aestivum, Triticum durum, Triticum turgidum, Triticum hybernum, Triticum macha, Triticum sativum, Triticum monococcum or Triticum vulgare), Tropaeolum minus, Tropaeolum majus, Vaccinium spp., Vicia spp., Vigna spp., Viola odorata, Vitis spp., Zea mays, Zizania palustris, Ziziphus spp., amongst others.

### Control Plant(s)

[0177] The choice of suitable control plants is a routine part of an experimental setup and may include corresponding wild type plants or corresponding plants without the gene of interest. The control plant is typically of the same plant species or even of the same variety as the plant to be assessed. The control plant may also be a nullizygote of the plant to be assessed. Nullizygotes are individuals missing the transgene by segregation. A “control plant” as used herein refers not only to whole plants, but also to plant parts, including seeds and seed parts.

### DETAILED DESCRIPTION OF THE INVENTION

[0178] Surprisingly, it has now been found that modulating expression in a plant of a nucleic acid encoding a FSM1-like polypeptide gives plants having enhanced yield-related traits relative to control plants. According to a first embodiment, the present invention provides a method for enhancing yield-related traits in plants relative to control plants, comprising modulating expression in a plant of a nucleic acid encoding a FSM1-like polypeptide and optionally selecting for plants having enhanced yield-related traits.

[0179] The invention also provides hitherto unknown FSM1-like-encoding nucleic acids and FSM1-like polypeptides useful for conferring enhanced yield-related traits in plants relative to control plants.

[0180] According to a further embodiment of the present invention, there is therefore provided an isolated nucleic acid molecule selected from:
[0181] (i) a nucleic acid represented by any of SEQ ID NO: 17, SEQ ID NO: 239, SEQ ID NO: 259, SEQ ID NO: 261, SEQ ID NO: 265, or SEQ ID NO: 277;
[0182] (ii) the complement of a nucleic acid represented by any of SEQ ID NO: 17, SEQ ID NO: 239, SEQ ID NO: 259, SEQ ID NO: 261, SEQ ID NO: 265, or SEQ ID NO: 277;
[0183] (iii) a nucleic acid encoding a FSM1-like polypeptide, comprising a MYB/SANT domain and having in increasing order of preference at least 50%, 51%, 52%, 53%, 54%, 55%, 56%, 57%, 58%, 59%, 60%, 61%, 62%, 63%, 64%, 65%, 66%, 67%, 68%, 69%, 70%, 71%, 72%, 73%, 74%, 75%, 76%, 77%, 78%, 79%, 80%, 81%, 82%, 83%, 84%, 85%, 86%, 87%, 88%, 89%, 90%, 91%, 92%, 93%, 94%, 95%, 96%, 97%, 98%, or 99% sequence identity to the amino acid sequence represented by any one of SEQ ID NO: 18, SEQ ID NO: 240, SEQ ID NO: 260, SEQ ID NO: 262, SEQ ID NO: 266, or SEQ ID NO: 278, and additionally or alternatively comprising one or more motifs having, in increasing order of preference, 4, or less than 4, less than 3, less than 2, or no substitutions (sequence mismatches) to any one or more of the motifs given in SEQ ID NO: 283 to SEQ ID NO: 288, and further preferably conferring enhanced yield-related traits relative to control plants.
[0184] (iv) a nucleic acid molecule which hybridizes with a nucleic acid molecule of (i) to (iii) under high stringency hybridization conditions and preferably confers enhanced yield-related traits relative to control plants.

[0185] According to a further embodiment of the present invention, there is also provided an isolated polypeptide selected from:
[0186] (i) an amino acid sequence represented by SEQ ID NO: 18, SEQ ID NO: 240, SEQ ID NO: 260, SEQ ID NO: 262, SEQ ID NO: 266, or SEQ ID NO: 278;
[0187] (ii) an amino acid sequence, comprising a MYB/SANT domain and having, in increasing order of preference, at least 50%, 51%, 52%, 53%, 54%, 55%, 56%, 57%, 58%, 59%, 60%, 61%, 62%, 63%, 64%, 65%, 66%, 67%, 68%, 69%, 70%, 71%, 72%, 73%, 74%, 75%, 76%, 77%, 78%, 79%, 80%, 81%, 82%, 83%, 84%, 85%, 86%, 87%, 88%, 89%, 90%, 91%, 92%, 93%, 94%, 95%, 96%, 97%, 98%, or 99% sequence identity to the amino acid sequence represented by SEQ ID NO: 18, SEQ ID NO: 240, SEQ ID NO: 260, SEQ ID NO: 262, SEQ ID NO: 266, or SEQ ID NO: 278, and additionally or alternatively comprising one or more motifs having, in increasing order of preference, 4 or less than 4, less than 3, less than 2, or no substitutions (sequence mismatches) to any of the motifs given in SEQ ID NO: 283 to SEQ ID NO: 288, and further preferably conferring enhanced yield-related traits relative to control plants;
[0188] (iii) derivatives of any of the amino acid sequences given in (i) or (ii) above.

[0189] Furthermore, it has now surprisingly been found that modulating expression in a plant of a nucleic acid encoding a PIF3-like polypeptide gives plants having enhanced yield-related traits relative to control plants. According to a first embodiment, the present invention provides a method for enhancing yield-related traits in plants relative to control plants, comprising modulating expression in a plant of a nucleic acid encoding a PIF3-like polypeptide and optionally selecting for plants having enhanced yield-related traits.

[0190] The invention also provides hitherto unknown PIF3-like-encoding nucleic acids and PIF3-like polypeptides useful for conferring enhanced yield-related traits in plants relative to control plants.

[0191] According to a further embodiment of the present invention, there is therefore provided an isolated nucleic acid molecule comprising any one of the following features selected from:
[0192] (i) a nucleic acid represented by SEQ ID NO: 356;
[0193] (ii) the complement of a nucleic acid represented by SEQ ID NO: 356;
[0194] (iii) a nucleic acid encoding a PIF3-like polypeptide having in increasing order of preference at least 50%, 51%, 52%, 53%, 54%, 55%, 56%, 57%, 58%, 59%, 60%, 61%, 62%, 63%, 64%, 65%, 66%, 67%, 68%, 69%, 70%, 71%, 72%, 73%, 74%, 75%, 76%, 77%, 78%, 79%, 80%, 81%, 82%, 83%, 84%, 85%, 86%, 87%, 88%, 89%, 90%, 91%, 92%, 93%, 94%, 95%, 96%, 97%, 98%, or 99% sequence identity to the amino acid sequence represented by SEQ ID NO: 357, and additionally or alternatively comprising one or more motifs having in increasing order of preference less than 5, less than 4, less than 3, less than 2, or less than 1 substitutions (sequence mismatches) compared to any one or more of the motifs given in SEQ ID NO: 358 to SEQ ID NO: 363, and further preferably conferring enhanced yield-related traits relative to control plants.
[0195] (iv) a nucleic acid molecule which hybridizes with a nucleic acid molecule of (i) to (iii) under high stringency hybridization conditions and preferably confers enhanced yield-related traits relative to control plants.

[0196] According to a further embodiment of the present invention, there is also provided an isolated polypeptide selected from:
[0197] (i) an amino acid sequence represented by SEQ ID NO: 357;
[0198] (ii) an amino acid sequence having, in increasing order of preference, at least 50%, 51%, 52%, 53%, 54%, 55%, 56%, 57%, 58%, 59%, 60%, 61%, 62%, 63%, 64%, 65%, 66%, 67%, 68%, 69%, 70%, 71%, 72%, 73%, 74%, 75%, 76%, 77%, 78%, 79%, 80%, 81%, 82%, 83%, 84%, 85%, 86%, 87%, 88%, 89%, 90%, 91%, 92%, 93%, 94%, 95%, 96%, 97%, 98%, or 99% sequence identity to the amino acid sequence represented by SEQ ID NO: 357, and additionally or alternatively comprising one or more motifs having in increasing order of preference less than 5, less than 4, less than 3, less than 2, or less than 1 substitutions (sequence mismatches) compared to any one or more of the motifs given in SEQ ID NO: 358 to SEQ ID NO: 363, and further preferably conferring enhanced yield-related traits relative to control plants;
[0199] (iii) derivatives of any of the amino acid sequences given in (i) or (ii) above.

[0200] Furthermore, it has now surprisingly been found that modulating expression in a plant of a nucleic acid encoding a UROD polypeptide gives plants having enhanced yield-related traits relative to control plants. According to a first embodiment, the present invention provides a method for enhancing yield-related traits in plants relative to control plants, comprising modulating expression in a plant of a nucleic acid encoding a UROD polypeptide and optionally selecting for plants having enhanced yield-related traits.

[0201] Furthermore, it has now surprisingly been found that modulating expression in a plant of a nucleic acid encoding an AS-MTT polypeptide gives plants having enhanced yield-related traits relative to control plants. According to a first embodiment, the present invention provides a method for enhancing yield-related traits in plants relative to control plants, comprising modulating expression in a plant of a nucleic acid encoding an AS-MTT polypeptide and optionally selecting for plants having enhanced yield-related traits.

[0202] Furthermore, it has now surprisingly been found that modulating expression in a plant of a nucleic acid encoding an EXO-1 polypeptide gives plants having enhanced yield-related traits relative to control plants. According to a first embodiment, the present invention provides a method for enhancing yield-related traits in plants relative to control plants, comprising modulating expression in a plant of a nucleic acid encoding an EXO-1 polypeptide and optionally selecting for plants having enhanced yield-related traits.

[0203] The invention also provides hitherto unknown EXO-1-encoding nucleic acids and EXO-1 polypeptides useful for conferring enhanced yield-related traits in plants relative to control plants.

[0204] Furthermore, it has now surprisingly been found that modulating expression in a plant of a nucleic acid encoding a YiAP2 polypeptide gives plants having enhanced yield-related traits relative to control plants. According to a first embodiment, the present invention provides a method for enhancing yield-related traits in plants relative to control plants, comprising modulating expression in a plant of a nucleic acid encoding a YiAP2 polypeptide and optionally selecting for plants having enhanced yield-related traits.

[0205] A preferred method for modulating (preferably, increasing) expression of a nucleic acid encoding a FSM1-like (Fruit Sant/Myb) polypeptide, or a PIF3-like (Phytochrome Interacting Factor 3) polypeptide, or a UROD polypeptide, or an AS-MTT (Abiotic Stress Membrane Tethered Transcription factor) polypeptide, or an EXO-1 polypeptide, or a YiAP2 polypeptide, is by introducing and expressing in a plant a nucleic acid encoding a FSM1-like (Fruit Sant/Myb) polypeptide, or a PIF3-like (Phytochrome Interacting Factor 3) polypeptide, or a UROD polypeptide, or an AS-MTT (Abiotic Stress Membrane Tethered Transcription factor) polypeptide, or an EXO-1 polypeptide, or a YiAP2 polypeptide.

[0206] In one embodiment, a “protein useful in the methods of the invention” is taken to mean a FSM1-like polypeptide as defined herein. In another embodiment, “nucleic acid useful in the methods of the invention” is taken to mean a nucleic acid capable of encoding such a FSM1-like polypeptide. The nucleic acid to be introduced into a plant (and therefore useful in performing the methods of the invention) is any nucleic acid encoding the type of protein which will now be described, hereafter also named “FSM1-like nucleic acid” or “FSM1-like gene”.

[0207] A “FSM1-like polypeptide” as defined herein refers to any polypeptide comprising a MYB/SANT domain (SMART accession SM00717, Pfam accession PF00249).

[0208] Additionally or alternatively, the FSM1-like protein comprises one or more of the following motifs:

Motif 1 (SEQ ID NO: 283):
W[TS][PA]K[QE]NK[LA]FE[RK]ALAVYD[KR][DE]
TPDR W[HSQ]N[VI]A[RK]A
Motif 2 (SEQ ID NO: 284):
GGK[ST][AV][ED]EV[KR]RHYE[IL]L
Motif 3 (SEQ ID NO: 285):
D[VL][KF][HF]I[ED][SN]G[RM]VPFP[NK]Y.

[0209] These motifs were derived using the MEME algorithm (Bailey and Elkan, Proceedings of the Second International Conference on Intelligent Systems for Molecular Biology, pp. 28-36, AAAI Press, Menlo Park, Calif., 1994.), MEME motifs represent the amino acid residues that are present in at least 80% of the FSM1-like proteins given in the sequence listing. The location of the motifs is shown in FIG. 1 (representing the protein sequence of SEQ ID NO: 2).

[0210] Alternatively or additionally, the FSM1-like polypeptide also comprises one or more of the following motifs:

Motif 4 (SEQ ID NO: 286):
W(T/S)(A/V/T)(K/Q)(E/Q/D)(N/S)K(D/A)FEX(A/V)LA
(E/V/T)(F/Y)D(K/R/Q)(D/E)(T/S)(P/A/R/C)(E/D/N)RWX
(N/D)VA(R/K/Q/H)(A/V)(V/I)(G/E/A)

[0211] wherein X on position 11 can be any amino acid, preferably one of E, R, K, S, Q, and wherein X on position 25 can be any amino acid, preferably one of S, A, Y, H, Q, K

Motif 5 (SEQ ID NO: 287):
T(V/P/A/T)(E/D)(E/D)(V/A)KX(H/Q)Y(E/D)(V/I/L/H)
L(L/V)

[0212] wherein X on position 7 can be any amino acid, preferably one of K, R, Q, H, S Motif 6 (SEQ ID NO: 288): I(E/D)(S/N)(G/D)XV(P/A)(L/F/Y)P
[0213] wherein X on position 5 can be any amino acid, preferably one of K, Q, R, H, M

[0214] More preferably, the FSM1-like polypeptide comprises in increasing order of preference, at least 2, at least 3, at least 4, at least 5, or all 6 of the above motifs.

[0215] Additionally or alternatively, the homologue of a FSM1-like protein has in increasing order of preference at least 25%, 26%, 27%, 28%, 29%, 30%, 31%, 32%, 33%, 34%, 35%, 36%, 37%, 38%, 39%, 40%, 41%, 42%, 43%, 44%, 45%, 46%, 47%, 48%, 49%, 50%, 51%, 52%, 53%, 54%, 55%, 56%, 57%, 58%, 59%, 60%, 61%, 62%, 63%, 64%, 65%, 66%, 67%, 68%, 69%, 70%, 71%, 72%, 73%, 74%, 75%, 76%, 77%, 78%, 79%, 80%, 81%, 82%, 83%, 84%, 85%, 86%, 87%, 88%, 89%, 90%, 91%, 92%, 93%, 94%, 95%, 96%, 97%, 98%, or 99% overall sequence identity to the amino acid represented by SEQ ID NO: 2, provided that the homologous protein comprises a MYB/SANT domain and preferably also any one or more of the conserved motifs as outlined above. The overall sequence identity is determined using a global alignment algorithm, such as the Needleman Wunsch algorithm in the program GAP (GCG Wisconsin Package, Accelrys), preferably with default parameters and preferably with sequences of mature proteins (i.e. without taking into account secretion signals or transit peptides). Compared to overall sequence identity, the sequence identity will generally be higher when only conserved domains or motifs are considered. Preferably the motifs in a FSM1-like polypeptide have, in increasing order of preference, at least 70%, 71%, 72%, 73%, 74%, 75%, 76%, 77%, 78%, 79%, 80%, 81%, 82%, 83%, 84%, 85%, 86%, 87%, 88%, 89%, 90%, 91%, 92%, 93%, 94%, 95%, 96%, 97%, 98%, or 99% sequence identity to any one or more of the motifs represented by SEQ ID NO: 283 to SEQ ID NO: 288 (Motifs 1 to 6).

[0216] Preferably, the polypeptide sequence which when used in the construction of a phylogenetic tree, clusters with the group of FSM1-like polypeptides comprising the amino acid sequence represented by SEQ ID NO: 2 rather than with other MYB proteins.

[0217] In another embodiment, a “protein useful in the methods of the invention” is taken to mean a PIF3-like polypeptide as defined herein. In another embodiment a “nucleic acid useful in the methods of the invention” is taken to mean a nucleic acid capable of encoding such a PIF3-like polypeptide. The nucleic acid to be introduced into a plant (and therefore useful in performing the methods of the invention) is any nucleic acid encoding the type of protein which will now be described, hereafter also named “PIF3-like nucleic acid” or “PIF3-like gene”.

[0218] A “PIF3-like polypeptide” as defined herein refers to SEQ ID NO: 293 and any homologous (preferably orthologous) polypeptide comprising a Helix-Loop-Helix domain (Pfam accession PF00010, InterPro IPR001092). Additionally or alternatively, the PIF3-like polypeptide comprises one or more of the following motifs:

Motif 7 (SEQ ID NO: 338):
[RKG][STG][TG][TS][TAS][KR]R[RS]RAA
EVHNLSERRRRDRINEKM[RK]ALQELIP[HNR]CNK[TS]DKAS
[MI]LDEAIEYLKSLQ[LM]Q[VL]Q[IM]M[WS]MG[SGC]G
Motif 8 (SEQ ID NO: 339):
[LI]x[PE][DE][ND][EGD]LVELLW[QCE]NG[QHG]VV

[0219] wherein x represents any amino acid.

[0220] These motifs were derived from MEME motifs (Bailey and Elkan, Proceedings of the Second International Conference on Intelligent Systems for Molecular Biology, pp. 28-36, AAAI Press, Menlo Park, Calif., 1994). MEME motifs represent the amino acid residues that are present in at least 80% of the FSM1-like proteins given in the sequence listing. The location of the motifs is shown in FIG. 1 (representing the protein sequence of SEQ ID NO: 293).

[0221] Additionally or alternatively, the PIF3-like polypeptide comprises one or more of the following motifs:

Motif 9 (SEQ ID NO: 340):
[E/D/N/G]L[V/I]EL[L/Q]W[R/Q/K/C][D/N]G[Q/E/H]VV
Motif 10 (SEQ ID NO: 341):
RAAEVHN
Motif 11 (SEQ ID NO: 342):
SERRRRDRINE
Motif 12 (SEQ ID NO: 343):
TDKAS[M/I]L[D/E]EAI[E/D]YLKSLQ[L/M/F]
QLQ[M/V/L]M WMG

[0222] Preferably, the PIF3-like polypeptide comprises in increasing order of preference, at least 1, at least 2, or at least 3 of the above motifs.

[0223] Additionally or alternatively, the homologue of a PIF3-like protein has in increasing order of preference at least 25%, 26%, 27%, 28%, 29%, 30%, 31%, 32%, 33%, 34%, 35%, 36%, 37%, 38%, 39%, 40%, 41%, 42%, 43%, 44%, 45%, 46%, 47%, 48%, 49%, 50%, 51%, 52%, 53%, 54%, 55%, 56%, 57%, 58%, 59%, 60%, 61%, 62%, 63%, 64%, 65%, 66%, 67%, 68%, 69%, 70%, 71%, 72%, 73%, 74%, 75%, 76%, 77%, 78%, 79%, 80%, 81%, 82%, 83%, 84%, 85%, 86%, 87%, 88%, 89%, 90%, 91%, 92%, 93%, 94%, 95%, 96%, 97%, 98%, or 99% overall sequence identity to the amino acid represented by SEQ ID NO: 293, provided that the homologous protein comprises any one or more of the conserved motifs as outlined above. The overall sequence identity is determined using a global alignment algorithm, such as the Needleman Wunsch algorithm in the program GAP (GCG Wisconsin Package, Accelrys), preferably with default parameters and preferably with sequences of mature proteins (i.e. without taking into account secretion signals or transit peptides). Compared to overall sequence identity, the sequence identity will generally be higher when only conserved domains or motifs are considered. Preferably the motifs in a PIF3-like polypeptide have, in increasing order of preference, at least 70%, 71%, 72%, 73%, 74%, 75%, 76%, 77%, 78%, 79%, 80%, 81%, 82%, 83%, 84%, 85%, 86%, 87%, 88%, 89%, 90%, 91%, 92%, 93%, 94%, 95%, 96%, 97%, 98%, or 99% sequence identity to any one or more of the motifs represented by SEQ ID NO: 338 to SEQ ID NO: 343 (Motifs 7 to 12).

[0224] Preferably, the polypeptide sequence which when used in the construction of a phylogenetic tree, clusters with the group of PIF3-like polypeptides (eventually refer to a specific group defined in the literature) comprising the amino acid sequence represented by SEQ ID NO: 293 rather than with any other group of bHLH proteins.

[0225] In another embodiment, a “protein useful in the methods of the invention” is taken to mean a UROD polypeptide as defined herein. In another embodiment, a “nucleic acid useful in the methods of the invention” is taken to mean a nucleic acid capable of encoding such a UROD polypeptide. The nucleic acid to be introduced into a plant (and therefore useful in performing the methods of the invention) is any nucleic acid encoding the type of protein which will now be described, hereinafter also named “UROD nucleic acid” or “UROD gene”.

[0226] A “UROD polypeptide” as defined herein refers to any polypeptide having uroporphyrinogen III decarboxylase activity, meaning any polypeptide having the capability to convert uroporphyrinogen III into coporphyrinogen.

[0227] Phylogenetic analysis shows that UROD polypeptides can be separated into two main clades: photosynthetic and non-photosynthetic (see FIGS. 12 and 13). Preferably, UROD polypeptides useful in the methods of the invention belong to the photosynthetic clade. The photosynthetic clade can be further subdivided into four main sub-clades: HEM1, HEM2, CYANO and others. Most preferably, UROD polypeptides useful in the methods of the invention belong to the HEM1 sub-clade.

[0228] UROD polypeptides typically comprise one or more of the following domains:

| | | Domain ID and | Short | |
|---|---|---|---|---|
| Method | | name | Name | Location |
| Interpro | IPR000257 | Uroporphyrinogen | URO-D | 4.8e−146 |
| | | decarboxylase | | [50-390]T |
| PFAM | PF01208 | Uroporphyrinogen | UROD_1 | NA [68-77] |
| | | decarboxylase | | |
| PROSITE | PS00907 | Uroporphyrinogen | UROD_2 | 8e−5 |
| | | decarboxylase | | [187-203]T |
| Interpro | IPRO06361 | Uroporphyrinogen | | |
| | | decarboxylase | | |
| | | HemE | | |
| PANTHER | PTHR21091: | Uroporphyrinogen | | 1e−127 |
| | SF2 | decarboxylase | | [65-390]T |
| TIGRFAMs | TIGR01464 | hemE: | | 3.6e−187 |
| | | uroporphyrinogen | | [54-389]T |
| | | decarboxylase | | |

[0229] UROD polypeptides typically comprise any one or more of Motifs 13 to 15. Motifs 12 to 15 are typically found in UROD polypeptides and can help distinguish UROD polypeptides from other polypeptides.

Motif 13 (SEQ ID NO: 515):
VERPPVW[ML]MRQAGRY[ML][KPA][EVS][YF][QR][ED]L
[RC][EK]K[YH][PD][SF]F
Motif 14 (SEQ ID NO: 516):
D[GA]VI[LI]FSDIL[TV][PI][LP][PQ][AG]M[GN]IPFD
[IM]V[EK][GS]KGP[VI]
Motif 15 (SEQ ID NO: 517):
LGFVGAP[WF]TLA[TAS]Y[VIM][VI]EGG[SG][ST]K

[0230] Preferably, in addition to any one or more of Motifs 13 to 15, a UROD polypeptide comprises any one or more of Motifs 16 to 18. Motifs 16 to 18 are typically found in photosynthetic UROD (PS-UROD) polypeptides.

Motif 16 (SEQ ID NO: 518):
QPW[RK][AV]F[KQ]PDGVI[LM]FSDILTPLP[GA]M[GN]
[IV]PFD
Motif 17 (SEQ ID NO: 519):
RPP[VA]W[ML]MRQAGRYM[KA][VS]Y[RQ]DL[CA][EDK]
K[YH]P
Motif 18 (SEQ ID NO: 520):
Y[IV]RYQ[IAV][DE]SGAQ[VAC][VI]QIFDSW[AG][GT][QE]L
[SP]P[QV]D[FWY]EE [FW][SA][LK]PY[LIQ][KQ]Q[IV]
[VI]D

[0231] Further preferably, in addition to any one or more of Motifs 13 to 15, a UROD polypeptide comprises any one or more of Motifs 16 to 18 and/or any one or more of Motifs 19 to 21. Motifs 19 to 21 are typically found in the HEM1 class of photosynthetic UROD (PS-UROD) polypeptides.

Motif 19 (SEQ ID NO: 521):
MCHTAP[HND]VLR[AGT]LLSHL[TA][QK]AI[SA][DE]Y[IV]
[IV][YF]QV[EN]SGA[HQ] CIQIFDSWGGQLPP[HED][MV]W
Motif 20 (SEQ ID NO: 522):
YINGNGGLLERMK[DG]TG[VA]DVIGLDWTVDMADGRRR
LG[SN][GD]I[SG][VI]Q GNVDPA[YF]L
Motif 21 (SEQ ID NO: 523):
A[VL]LGFVGAPVVTIATY[IV]VEGG[TM]T[RN]TYT[NT]IK

[0232] According to another embodiment, in addition to any one or more of Motifs 13 to 15, a UROD polypeptide comprises any one or more of Motifs 16 to 18 and/or any one or more of Motifs 22 to 24. Motifs 22 to 24 are typically found in the HEM2 class of photosynthetic UROD (PS-UROD) polypeptides.

Motif 22 (SEQ ID NO: 524):
W[LM]MRQAGRYMK[SV]YQ[DIT][LI]C[EK][KR][YH]P[ST]
FRERSEN[VA]DL[VA]V EISLQPW[KR][VA]FKPDGVI
Motif 23 (SEQ ID NO: 525):
YI[RQ]YQAD[NS]GAQ[AV]VQIFDSWATELSPVDFEEF
SLPYLKQI[VI][DAE][AEST] VK[KQ]THP[DN]L
Motif 24 (SEQ ID NO: 526):
YVG[EQ]AL[TS]ILR[KAE]EV[GND]N[EK]A[AT]VLGFVGAP
FTLASY[VI]VEGGSSK [NH][FY][TS]KIK[RK][LM]AF

[0233] According to another embodiment, in addition to any one or more of Motifs 13 to 15, a UROD polypeptide comprises any one or more of Motifs 25 to 27. Motifs 25 to 27 are typically found in the CYANO class of photosynthetic UROD (PS-UROD) polypeptides.

Motif 25 (SEQ ID NO: 527):
PVWMMRQAGRYMK[VI]YRDLR[DE][KN][YH]PSFRERSEN
[PA]DL[AS][IY]EIS [LM]QP[WF][RHK]AFQPDG
Motif 26 (SEQ ID NO: 528):
Y[VL][RS]YQI[DQ][CS]GAQV[VI]Q[ML]FDSWAGQL[ST]
PQDY[DE][TVE]FA[LA]P YQ[QK][KQ]VV[RDN][LQ]VK
[EA][TK]HPDT
Motif 27 (SEQ ID NO: 529):
[TR]LRQEVGN[QK][AS][TA]VLGFVG[AS]PWTLAAY[AV]
[IV]EGKSSK[ND]YA[VI]I KAMAFSEP[EA][IL]LH

[0234] According to another embodiment, in addition to any one or more of Motifs 13 to 15, a UROD polypeptide comprises any one or more of Motifs 28 to 30. Motifs 28 to 30 are typically found in the CYANO class of photosynthetic UROD (PS-UROD) polypeptides.

Motif 28 (SEQ ID NO: 530):
FR[EH]RSET[PA][ED]IAIELS[LM]Q[PC][WH]RA[FY][GKR]
[PM]DG[VI]IMFSDILTP LP[AT][LM]GI[ED]FD[VIM]VKGK
Motif 29 (SEQ ID NO: 531):
[HS]AFL[DS][KH]L[AT][DE][AM][LI][GI]VY[VA]C[HY]QI
[ED]SGAQV[VI]Q[ILV]F[DE] SWA[HG][HQ]LSP[QA]Q[FY]
[LE]EF[SA][HKL]P[YA][AN][EQ]
Motif 30 (SEQ ID NO: 532):
QPW[RK][AV]F[KQ]PDGVI[LM]FSDILTPLP[GA]M[GN]
[IV]PFD

[0235] Motifs 13 to 30 were generated using MEME 4.0.0 from public website (meme.nbcr.net/meme4/cgi-bin/meme.cgi). The MEME algorithm was as disclosed in Bailey and Elkan, Proceedings of the Second International Conference on Intelligent Systems for Molecular Biology, pp. 28-36, AAAI Press, Menlo Park, Calif., 1994.

[0236] More preferably, the UROD polypeptide comprises in increasing order of preference any 2, 3, 4, 5, 6, 7, 8, 9, 10, 11, 12, 13, 14, 15, 16, 17 or 18 of the abovementioned Motifs.

[0237] Additionally or alternatively, the homologue of a UROD protein has in increasing order of preference at least 25%, 26%, 27%, 28%, 29%, 30%, 31%, 32%, 33%, 34%, 35%, 36%, 37%, 38%, 39%, 40%, 41%, 42%, 43%, 44%, 45%, 46%, 47%, 48%, 49%, 50%, 51%, 52%, 53%, 54%, 55%, 56%, 57%, 58%, 59%, 60%, 61%, 62%, 63%, 64%, 65%, 66%, 67%, 68%, 69%, 70%, 71%, 72%, 73%, 74%, 75%, 76%, 77%, 78%, 79%, 80%, 81%, 82%, 83%, 84%, 85%, 86%, 87%, 88%, 89%, 90%, 91%, 92%, 93%, 94%, 95%, 96%, 97%, 98%, or 99% overall sequence identity to the amino acid represented by SEQ ID NO: 368, provided that the homologous protein comprises any one or more of the conserved motifs as outlined above.

[0238] The overall sequence identity is determined using a global alignment algorithm, such as the Needleman Wunsch algorithm in the program GAP (GCG Wisconsin Package, Accelrys), preferably with default parameters and preferably with sequences of mature proteins (i.e. without taking into account secretion signals or transit peptides). Compared to overall sequence identity, the sequence identity will generally be higher when only conserved domains or motifs are considered. Preferably the motifs in a UROD polypeptide have, in increasing order of preference, at least 70%, 71%, 72%, 73%, 74%, 75%, 76%, 77%, 78%, 79%, 80%, 81%, 82%, 83%, 84%, 85%, 86%, 87%, 88%, 89%, 90%, 91%, 92%, 93%, 94%, 95%, 96%, 97%, 98%, or 99% sequence identity to any one or more of the motifs represented by SEQ ID NO: 515 to SEQ ID NO: 532 (Motifs 13 to 30).

[0239] Preferably, the polypeptide sequence which when used in the construction of a phylogenetic tree, clusters with the group of UROD polypeptides comprising the amino acid sequence represented by SEQ ID NO: 368 rather than with any other group.

[0240] In another embodiment a “protein useful in the methods of the invention” is taken to mean an AS-MTT polypeptide as defined herein. In another embodiment a “nucleic acid useful in the methods of the invention” is taken to mean a nucleic acid capable of encoding such an AS-MTT polypeptide. The nucleic acid to be introduced into a plant (and therefore useful in performing the methods of the invention) is any nucleic acid encoding the type of protein which will now be described, hereafter also named “AS-MTT nucleic acid” or “AS-MTT gene”.

[0241] An “AS-MTT polypeptide” as defined herein refers to any polypeptide comprising a pfam conserved domain having accession number PF07889.

[0242] A PF07889 domain is also referred to as a DUF1664 domain in the terminology of the pfam database (Pfam version 23.0 (July 2008, 10340 families) R. D. Finn, J. Tate, J. Mistry, P. C. Coggill, J. S. Sammut, H. R. Hotz, G. Ceric, K. Forslund, S. R. Eddy, E. L. Sonnhammer and A. Bateman Nucleic Acids Research (2008) Database Issue 36:D281-D288). A person skilled in the art could readily determine whether any amino acid sequence in question falls within the definition of an “AS-MTT polypeptide” using known techniques and software to consult or search databases of conserved protein domains such as pfam. For Example Interpro database maybe searched as detailed in the Examples section herein.

[0243] PF07889 domain refers to a protein domain of approximately 100 amino acids long which occurs in proteins of plant origin.

[0244] Preferably the polypeptide useful in the methods of the invention comprises a protein domain having in increasing order of preference at least 50%, 51%, 52%, 53%, 54%, 55%, 56%, 57%, 58%, 59%, 60%, 61%, 62%, 63%, 64%, 65%, 66%, 67%, 68%, 69%, 70%, 71%, 72%, 73%, 74%, 75%, 76%, 77%, 78%, 79%, 80%, 81%, 82%, 83%, 84%, 85%, 86%, 87%, 88%, 89%, 90%, 91%, 92%, 93%, 94%, 95%, 96%, 97%, 98%, 99% or 100% sequence identity to the amino acid sequence located between amino acid coordinates 94 to 126 in SEQ ID NO: 537 or to the amino acid sequence of a PF07889 domain as present in any of the polypeptides of Table A4.

[0245] Additionally or alternatively, the “AS-MTT polypeptide” useful in the methods of the invention is located at a membrane, preferably at the endoplasmic reticulum. Preferably the “AS-MTT polypeptide” comprises a transmembrane domain, most preferably the transmembrane domain any of the transmembrane domains present in any of the polypeptides of Table A4, most preferably represented by the sequence located between amino acids 1 to 23 or 1 to 25 or 95 to 115 of SEQ ID NO: 537. A person skilled in the art could readily determine whether any amino acid sequence in question falls comprises a transmembrane domain using known techniques and software such as for Example TMHMM or SignalP as described in the Examples section herein.

[0246] Additionally or alternatively, preferably an “AS-MTT polypeptide” as defined herein is one comprising any one or more of the Motifs described below:

### Motif 31 (SEQ ID NO: 648):

[0247] G[WL][SK][FL]SD[LV]M[YF][VA]T[KR]R[NS][ML][AS][ND]AV[SA][SN][VL][TS]K[QH]L[ED][QN]VS[ESD][AS]LAA[TA]K[RK]HL[TS]QR (wherein amino acids between bracket represent alternative amino acids at that position), or a motif having in increasing order of preference at least 50%, 51%, 52%, 53%, 54%, 55%, 56%, 57%, 58%, 59%, 60%, 61%, 62%, 63%, 64%, 65%, 66%, 67%, 68%, 69%, 70%, 71%, 72%, 73%, 74%, 75%, 76%, 77%, 78%, 79%, 80%, 81%, 82%, 83%, 84%, 85%, 86%, 87%, 88%, 89%, 90%, 91%, 92%, 93%, 94%, 95%, 96%, 97%, 98%, 99% or 100% sequence identity to the sequence of Motif 31, preferably to Motif 31 as present in any of the polypeptides of Table A4 and represented by a sequence of 43 amino acid in length starting at the indicated amino acid coordinate in Table 3a;

### Motif 32 (SEQ ID NO: 649):

[0248] AA[AT][VL]G[AV][VLM]GY[GC]YMWWK (wherein amino acids between bracket represent alternative amino acids at that position), or a motif having in increasing order of preference at least 50%, 51%, 52%, 53%, 54%, 55%, 56%, 57%, 58%, 59%, 60%, 61%, 62%, 63%, 64%, 65%, 66%, 67%, 68%, 69%, 70%, 71%, 72%, 73%, 74%, 75%, 76%, 77%, 78%, 79%, 80%, 81%, 82%, 83%, 84%, 85%, 86%, 87%, 88%, 89%, 90%, 91%, 92%, 93%, 94%, 95%, 96%, 97%, 98%, 99% or 100% sequence identity to the sequence of Motif 32, preferably to Motif 32 as present in any of the polypeptides of Table A4 as represented by a sequence of 15 amino acid in length starting at the indicated amino acid coordinate in Table 3a;

### Motif 33 (SEQ ID NO: 650):

[0249] GAG[LY]TG[ST][IV][LV][LA][KR][NE]G[KR]L (wherein amino acids between bracket represent alternative amino acids at that position), or a motif having in increasing order of preference at least 50%, 51%, 52%, 53%, 54%, 55%, 56%, 57%, 58%, 59%, 60%, 61%, 62%, 63%, 64%, 65%, 66%, 67%, 68%, 69%, 70%, 71%, 72%, 73%, 74%, 75%, 76%, 77%, 78%, 79%, 80%, 81%, 82%, 83%, 84%, 85%, 86%, 87%, 88%, 89%, 90%, 91%, 92%, 93%, 94%, 95%, 96%, 97%, 98%, 99% or 100% sequence identity to the sequence of Motif 33, preferably to Motif 33 as present in any of the polypeptides of Table A4 as represented by a sequence of 15 amino acid in length starting at the indicated amino acid coordinate in Table 3a.

[0250] Additionally or alternatively, preferably the polypeptide useful in the methods of the invention comprises a motif having in increasing order of preference at least 50%, 51%, 52%, 53%, 54%, 55%, 56%, 57%, 58%, 59%, 60%, 61%, 62%, 63%, 64%, 65%, 66%, 67%, 68%, 69%, 70%, 71%, 72%, 73%, 74%, 75%, 76%, 77%, 78%, 79%, 80%, 81%, 82%, 83%, 84%, 85%, 86%, 87%, 88%, 89%, 90%, 91%, 92%, 93%, 94%, 95%, 96%, 97%, 98%, 99% or 100% sequence identity to any one or more of:
[0251] (i) Motif 31; and
[0252] (ii) Motif 32; and
[0253] (iii) Motif 33.

[0254] Amino acids indicated between brackets represent alternative amino acids at such amino acid position.

[0255] Motifs 31, 32 and 33 are typically found in AS-MTT polypeptides from any plant origin.

[0256] Additionally or alternatively, more preferably an “AS-MTT polypeptide” as defined herein is one comprising any one or more of the Motifs described below:

### Motif 34 (SEQ ID NO: 651):

[0257] G[LI][SK]F[SA]DLMYVTKR[NS]MA[NT]AV[SA][NS][LM]TK[HN]L[ED]QV[SQ][ED][AS]L[AS]A[AT]K[KR]HLTQR (wherein amino acids between bracket represent alternative amino acids at that position), or a motif having in increasing order of preference at least 50%, 51%, 52%, 53%, 54%, 55%, 56%, 57%, 58%, 59%, 60%, 61%, 62%, 63%, 64%, 65%, 66%, 67%, 68%, 69%, 70%, 71%, 72%, 73%, 74%, 75%, 76%, 77%, 78%, 79%, 80%, 81%, 82%, 83%, 84%, 85%, 86%, 87%, 88%, 89%, 90%, 91%, 92%, 93%, 94%, 95%, 96%, 97%, 98%, 99% or 100% sequence identity to the sequence of Motif 34, preferably to Motif 34 as present in any of the polypeptides of Table A4 as represented by a sequence of 43 amino acid in length starting at the indicated amino acid coordinate in Table 3b;

### Motif 35 (SEQ ID NO: 652):

[0258] [NG][GS][GS][SQ][GQ]G[NG]L[TS][SG]L[IV][VM]PAA[TA][LV]GA[LV]GYGYMWWK (wherein amino acids between bracket represent alternative amino acids at that position), or a motif having in increasing order of preference at least 50%, 51%, 52%, 53%, 54%, 55%, 56%, 57%, 58%, 59%, 60%, 61%, 62%, 63%, 64%, 65%, 66%, 67%, 68%, 69%, 70%, 71%, 72%, 73%, 74%, 75%, 76%, 77%, 78%, 79%, 80%, 81%, 82%, 83%, 84%, 85%, 86%, 87%, 88%, 89%, 90%, 91%, 92%, 93%, 94%, 95%, 96%, 97%, 98%, 99% or 100% sequence identity to the sequence of Motif 35, preferably to Motif 35 as present in any of the polypeptides of Table A4 as represented by a sequence of 29 amino acid in length starting at the indicated amino acid coordinate in Table 3b;

### Motif 36 (SEQ ID NO: 653):

[0259] [MA]AMQ[AS]G[MIV]G[LFV][ST][KR][IV][LV]IL[AV]GAGYTGT[IV][LMV]LKNG (wherein amino acids between bracket represent alternative amino acids at that position), or a motif having in increasing order of preference at least 50%, 51%, 52%, 53%, 54%, 55%, 56%, 57%, 58%, 59%, 60%, 61%, 62%, 63%, 64%, 65%, 66%, 67%, 68%, 69%, 70%, 71%, 72%, 73%, 74%, 75%, 76%, 77%, 78%, 79%, 80%, 81%, 82%, 83%, 84%, 85%, 86%, 87%, 88%, 89%, 90%, 91%, 92%, 93%, 94%, 95%, 96%, 97%, 98%, 99% or 100% sequence identity to the sequence of Motif 36, preferably to Motif 36 as present in any of the polypeptides of Table A4 as represented by a sequence of 29 amino acid in length starting at the indicated amino acid coordinate in Table 3b.

[0260] Additionally or alternatively, more preferably the polypeptide useful in the methods of the invention comprises a motif having in increasing order of preference at least 50%, 51%, 52%, 53%, 54%, 55%, 56%, 57%, 58%, 59%, 60%, 61%, 62%, 63%, 64%, 65%, 66%, 67%, 68%, 69%, 70%, 71%, 72%, 73%, 74%, 75%, 76%, 77%, 78%, 79%, 80%, 81%, 82%, 83%, 84%, 85%, 86%, 87%, 88%, 89%, 90%, 91%, 92%, 93%, 94%, 95%, 96%, 97%, 98%, 99% or 100% sequence identity to any one or more of:
[0261] (iv) Motif 34; and
[0262] (v) Motif 35; and
[0263] (vi) Motif 36.

[0264] Motifs 34, 35 and 36 are typically found in any AS-MTT polypeptide from clades A and B. Such clades referring to the phylogenetic tree as described in the Examples section herein.

[0265] Additionally or alternatively, even more preferably an “AS-MTT polypeptide” as defined herein is one comprising any one or more of the Motifs described below:

### Motif 37 (SEQ ID NO: 654):

[0266] LI[VM]PAATLGA[LV]GYGYMWWKGL[KS]FSDLMYVTKR[NS]MA[TS]AV[SAE]NLTK[HN]L[ED][QS]VSE (wherein amino acids between bracket represent alternative amino acids at that position), or a motif having in increasing order of preference at least 50%, 51%, 52%, 53%, 54%, 55%, 56%, 57%, 58%, 59%, 60%, 61%, 62%, 63%, 64%, 65%, 66%, 67%, 68%, 69%, 70%, 71%, 72%, 73%, 74%, 75%, 76%, 77%, 78%, 79%, 80%, 81%, 82%, 83%, 84%, 85%, 86%, 87%, 88%, 89%, 90%, 91%, 92%, 93%, 94%, 95%, 96%, 97%, 98%, 99% or 100% sequence identity to the sequence of Motif 37, preferably to Motif 37 as present in any of the polypeptides of Table A4 as represented by a sequence of 50 amino acid in length starting at the indicated amino acid coordinate in Table 3c;

### Motif 38 (SEQ ID NO: 655):

[0267] MAMQ[AS]G[IV][GS][LVF]S[KR]ILILAGAGYT[GS]TI[LM]LKNGKLS[DE][LI][LI]GELQSL[VL][KN]G[ML][EG][KE]SG[ED] (wherein amino acids between bracket represent alternative amino acids at that position), or a motif having in increasing order of preference at least 50%, 51%, 52%, 53%, 54%, 55%, 56%, 57%, 58%, 59%, 60%, 61%, 62%, 63%, 64%, 65%, 66%, 67%, 68%, 69%, 70%, 71%, 72%, 73%, 74%, 75%, 76%, 77%, 78%, 79%, 80%, 81%, 82%, 83%, 84%, 85%, 86%, 87%, 88%, 89%, 90%, 91%, 92%, 93%, 94%, 95%, 96%, 97%, 98%, 99% or 100% sequence identity to the sequence of Motif 38, preferably to Motif 38 as present in any of the polypeptides of Table A4 as represented by a sequence of 50 amino acid in length starting at the indicated amino acid coordinate in Table 3c;

### Motif 39 (SEQ ID NO: 656):

[0268] A[LI][AS][AT]AK[KT]HLTQRIQ[NH][LV]DDK[MV]E[KES]Q[KN][ED][IL]SK[SA]I[QK][NE][DN]VNA[AV][QS]E[ND]L (wherein amino acids between bracket represent alternative amino acids at that position), or a motif having in increasing order of preference at least 50%, 51%, 52%, 53%, 54%, 55%, 56%, 57%, 58%, 59%, 60%, 61%, 62%, 63%, 64%, 65%, 66%, 67%, 68%, 69%, 70%, 71%, 72%, 73%, 74%, 75%, 76%, 77%, 78%, 79%, 80%, 81%, 82%, 83%, 84%, 85%, 86%, 87%, 88%, 89%, 90%, 91%, 92%, 93%, 94%, 95%, 96%, 97%, 98%, 99% or 100% sequence identity to the sequence of Motif 39, preferably to Motif 39 as present in any of the polypeptides of Table A4 as represented by a sequence of 41 amino acid in length starting at the indicated amino acid coordinate in Table 3c.

[0269] Additionally or alternatively, even more preferably the polypeptide useful in the methods of the invention comprises a motif having in increasing order of preference at least 50%, 51%, 52%, 53%, 54%, 55%, 56%, 57%, 58%, 59%, 60%, 61%, 62%, 63%, 64%, 65%, 66%, 67%, 68%, 69%, 70%, 71%, 72%, 73%, 74%, 75%, 76%, 77%, 78%, 79%, 80%, 81%, 82%, 83%, 84%, 85%, 86%, 87%, 88%, 89%, 90%, 91%, 92%, 93%, 94%, 95%, 96%, 97%, 98%, 99% or 100% sequence identity to any one or more of:
[0270] (vii) Motif 37; and
[0271] (viii) Motif 38; and
[0272] (ix) Motif 39.

[0273] Motifs 37, 38 and 39 are typically found in any AS-MTT polypeptides from clade A. This clade A is shown in the phylogenetic tree as defined in the Examples section herein.

[0274] Most preferably an “AS-MTT polypeptide” as defined herein is one comprising any one or more of the Motifs as described in Tables 3a, 3b, 3c.

TABLES 3a
Motifs 31, Motif 32, and Motif 33 as present in the polypeptides of Table A4.

| | ALL AS-MTT | | |
|---|---|---|---|
| | Motif 31 | Motif 32 | Motif 33 |
| Length | 43 | 15 | 15 |
| (in amino | Amino acid | Amino acid | Amino acid |
| acid) | coordinate | coordinate | coordinate |
| Name | Start | Start | Start |
| P.trichocarpa_657115#1_A | 114 | 99 | 16 |
| P.trichocarpa_657115#1.2_A | 111 | 98 | 16 |
| P.persica_TC1247#1_A | 111 | 98 | 16 |
| C.sinensis_TC3201#1_A | 115 | 100 | 16 |
| M.domestica_TC12261#1_A | 115 | 99 | 16 |
| A.thaliana_AT2G02730.1#1_A | 120 | 99 | 16 |
| G.hirsutum_TC83567#1_A | 118 | 99 | 18 |
| B.napus_TC66611#1_A | 114 | 99 | 18 |
| A.thaliana_AT1G27000.1#1_A | 113 | 94 | 16 |
| M.domestica_TC9509#1_A | 116 | 97 | 16 |
| M.truncatula_AC136286_4.4#1_A | 113 | 97 | 16 |
| P.trichocarpa_566293#1_A | 113 | 102 | 16 |
| S.officinarum_TC86637#1_B | 116 | 103 | 16 |
| P.americana_TA1256_3435#1_B | 116 | 103 | 16 |
| C.maculosa_TA1398_215693#1_B | 117 | 98 | 16 |
| O.sativa_LOC_Os01g08990.1#1_B | 114 | 96 | 16 |
| O.sativa_LOC_Os05g08980.1#1_B | 114 | 101 | 16 |
| T.officinale_TA751_50225#1_B | 113 | 101 | 16 |
| F.arundinacea_TC6829#1_B | 113 | 95 | 16 |
| S.bicolor_Sb03g003440.1#1_B | 114 | 94 | 16 |
| I.nil_TC6724#1_B | 110 | 94 | 16 |
| S.tuberosum_TC170010#1_B | 116 | 101 | 16 |
| Aquilegia_sp_TC25212#1_B | 114 | 101 | 17 |
| V.vinifera_GSVIVT00029000001#1_B | 112 | 101 | 17 |
| H.annuus_TC32349#1_B | 114 | 99 | 16 |
| A.comosus_DT336453#1_bZIP17-like | 112 | 97 | 17 |
| Triphysaria_sp_TC1899#1_bZIP17-like | 116 | 99 | 12 |
| M.truncatula_CU024880_148.4#1_bZIP17-like | 112 | 98 | 12 |
| L.sativa_TC16705#1_bZIP17-like | 109 | 99 | 16 |
| P.taeda_TA8248_3352#1_bZIP17-like | 111 | 98 | 16 |
| H.paradoxus_TA2663_73304#1_bZIP17-like | 114 | 100 | 16 |
| E.esula_TC4805#1_bZIP17-like | 115 | 100 | 12 |
| I.nil_TC113#1_bZIP17-like | 110 | 98 | 16 |
| A.thaliana_AT1G04960.1#1_bZIP17-like | 109 | 96 | 12 |
| O. sativa_LOC_Os09g30478.1#1_bZIP17-like | 114 | 99 | 12 |
| Aquilegia_sp_TC26001#1_bZIP17-like | 112 | 96 | 12 |
| H.vulgare_TC157185#1_bZIP17-like | 111 | 104 | 12 |
| P.trichocarpa_645036#1_bZIP17-like | 112 | 97 | 16 |
| T.aestivum_TC297361#1_bZIP17-like | 114 | 96 | 16 |
| S.tuberosum_TC182348#1_bZIP17-like | 109 | 97 | 18 |
| E.esula_TC6178#1_Unk | 114 | 97 | 9 |
| L.sativa_TC18726#1_Unk | 112 | 100 | 16 |
| P.patens_136490#1_Unk | 113 | 97 | 16 |
| V.vinifera_GSVIVT00002774001#1_Unk | 112 | 99 | 12 |
| C.solstitialis_TA4216_347529#1_Unk | 112 | 97 | 16 |
| S.moellendorftli_271950#1_Unk | 119 | 97 | 12 |
| A.thaliana_AT1G24267.1#1_Unk | 106 | 98 | 17 |
| G.hirsutum_TC128629#1_Unk | 112 | 91 | 17 |
| A.thaliana_AT1G24265.2#1_Unk | 115 | 95 | 12 |
| G.max_Glyma08g29150.1#1_Unk | 113 | 96 | 12 |
| S.bicolor_Sb03g009200.1#1_Unk | 111 | 96 | 16 |
| O.sativa_LOC_Os01g02180.1#1_Unk | 109 | 99 | 10 |
| Aquilegia_sp_TC28043#1_Unk | 111 | 97 | 12 |
| S.tuberosum_TC184255#1_Unk | 112 | 94 | 18 |
| P.trichocarpa_554754#1_Unk | 112 | 97 | 10 |
| Triphysaria_sp_TC917#1_Unk | 113 | 98 | 65 |

TABLE 3b
Motifs 34, Motif 35, and Motif 36 as present the polypeptides of
Clades A and B of the phylogenetic tree.

| | Clades A and B | | |
|---|---|---|---|
| | Motif 34 | Motif 35 | Motif 36 |
| Length | 43 | 29 | 29 |
| in | Amino | Amino | Amino |
| amino | acid | acid | acid |
| acids | coordinate | coordinate | coordinate |
| Name | Start | End | End |
| I.nil_TC6724#1_B | 111 | 83 | 1 |
| C.maculosa_TA1398_215693#1_B | 113 | 83 | 1 |
| S.tuberosum_TC170010#1_B | 111 | 87 | 1 |
| O.sativa_LOC_Os05g08980.1#1_B | 118 | 87 | 1 |
| S.officinarum_TC86637#1_B | 120 | 87 | 1 |
| H.annuus_TC32349#1_B | 113 | 87 | 1 |
| P.trichocarpa_566293#1_A | 116 | 84 | 1 |
| P.trichocarpa_657115#1_A | 116 | 82 | 1 |
| P.americana_TA1256_3435#1_B | 116 | 81 | 1 |
| A.thaliana_AT1G27000.1#1_A | 114 | 82 | 1 |
| T.officinale_TA751_50225#1_B | 113 | 80 | 1 |
| Aquilegia_sp_TC25212#1_B | 110 | 80 | 1 |
| F.arundinacea_TC6829#1_B | 117 | 85 | 1 |
| P.trichocarpa_657115#1.2_A | 116 | 83 | 1 |
| G.hirsutum_TC83567#1_A | 110 | 84 | 1 |
| B.napus_TC66611#1_A | 112 | 84 | 1 |
| P.persica_TC1247#1_A | 109 | 88 | 1 |
| V.vinifera_ | 116 | 89 | 1 |
| GSVIVT00029000001#1_B | | | |
| M.domestica_TC12261#1_A | 112 | 89 | 1 |
| A.thaliana_AT2G02730.1#1_A | 111 | 82 | 2 |
| O.sativa_LOC_Os01g08990.1#1_B | 111 | 90 | 1 |
| C.sinensis_TC3201#1_A | 109 | 87 | 1 |
| S.bicolor_Sb03g003440.1#1_B | 114 | 85 | 1 |
| M.domestica_TC9509#1_A | 112 | 81 | 1 |
| M.truncatula_AC136286_4.4#1_A | 119 | 82 | 1 |

TABLE 3c
Motifs 37, Motif 38, and Motif 39 as present the polypeptides
of Clades A of the phylogenetic tree.

| | Clade A | | |
|---|---|---|---|
| | Motif 37 | Motif 38 | Motif 39 |
| Length in | 50 | 50 | 41 |
| amino | Amino acid | Amino acid | Amino acid |
| acids | coordinate | coordinate | coordinate |
| Name | Start | End | End |
| P.trichocarpa_566293#1_A | 97 | 1 | 147 |
| P.trichocarpa_657115#1_A | 97 | 1 | 147 |
| P.trichocarpa_657115#1.2_A | 97 | 1 | 147 |
| P.persica_TC1247#1_A | 90 | 1 | 141 |
| M.domestica_TC12261#1_A | 93 | 1 | 143 |
| G.hirsutum_TC83567#1_A | 91 | 1 | 140 |
| A.thaliana_AT2G02730.1#1_A | 92 | 1 | 143 |
| A.thaliana_AT1G27000.1#1_A | 95 | 1 | 145 |
| M.domestica_TC9509#1_A | 93 | 1 | 140 |
| B.napus_TC66611#1_A | 93 | 1 | 143 |
| C.sinensis_TC3201#1_A | 90 | 1 | 150 |
| M.truncatula_ | 100 | 2 | 142 |
| AC136286_4.4#1_A | | | |

[0275] More preferably, the AS-MTT polypeptide comprises in increasing order of preference, at least 2, at least 3, at least 4, at least 5, at least 6, at least 7, at least 8, or all 12.

[0276] Alternatively, preferably, the AS-MTT polypeptide refers to a homologue of any of the polypeptides of Table A4.

[0277] Additionally or alternatively, the homologue of an AS-MTT protein has in increasing order of preference at least 25%, 26%, 27%, 28%, 29%, 30%, 31%, 32%, 33%, 34%, 35%, 36%, 37%, 38%, 39%, 40%, 41%, 42%, 43%, 44%, 45%, 46%, 47%, 48%, 49%, 50%, 51%, 52%, 53%, 54%, 55%, 56%, 57%, 58%, 59%, 60%, 61%, 62%, 63%, 64%, 65%, 66%, 67%, 68%, 69%, 70%, 71%, 72%, 73%, 74%, 75%, 76%, 77%, 78%, 79%, 80%, 81%, 82%, 83%, 84%, 85%, 86%, 87%, 88%, 89%, 90%, 91%, 92%, 93%, 94%, 95%, 96%, 97%, 98%, 99% or 100% overall sequence identity to the amino acid represented by any of the polypeptides of Table A4 and most preferably to SEQ ID NO: 537. The overall sequence identity is determined using a global alignment algorithm, such as the Needleman Wunsch algorithm in the program GAP (GCG Wisconsin Package, Accelrys), preferably with default parameters and preferably with sequences of mature proteins (i.e. without taking into account secretion signals or transit peptides). Compared to overall sequence identity, the sequence identity will generally be higher when only conserved domains or motifs are considered. Preferably the homologue of an AS-MTT polypeptide has, in increasing order of preference, at least 70%, 71%, 72%, 73%, 74%, 75%, 76%, 77%, 78%, 79%, 80%, 81%, 82%, 83%, 84%, 85%, 86%, 87%, 88%, 89%, 90%, 91%, 92%, 93%, 94%, 95%, 96%, 97%, 98%, or 99% sequence identity to any of the motifs represented by Motifs 37, Motif 38 and Motif 39.

[0278] Preferably, the AS-MTT polypeptide sequence when used in the construction of a phylogenetic tree, clusters within Clade A, preferably with the polypeptide represented by SEQ ID NO: 537.

[0279] In another embodiment a “protein useful in the methods of the invention” is taken to mean an EXO-1 polypeptide as defined herein. In another embodiment a “nucleic acid useful in the methods of the invention” is taken to mean a nucleic acid capable of encoding such an EXO-1 polypeptide. The nucleic acid to be introduced into a plant (and therefore useful in performing the methods of the invention) is any nucleic acid encoding the type of protein which will now be described, hereinafter also named “EXO-1 nucleic acid” or “EXO-1 gene”.

[0280] An “EXO-1 polypeptide” as defined herein refers to any polypeptide comprising at least a XPG_N domain in the N-terminal region of the polypeptide with a PFAM accession number PF 00752 followed by a XPG_1 domain having a PFAM accession number PF 00867 and included in the EXONUCLEASE 1 domain (PTHR 11081:SF8 or PTHR 11081:SF9).

[0281] EXO-1 polypeptides typically belong to the nucleases family and proteins comprising EXO-1 polypeptide are involved in DNA repair process, more specifically having a 5′-nuclease activity (EC 3.1.11.1).

[0282] Preferably, the XPG_N domain of an EXO-1 polypeptide has, in increasing order of preference at least, 49%, 50%, 51%, 52%, 53%, 54%, 55%, 56%, 57%, 58%, 59%, 60%, 61%, 62%, 63%, 64%, 65%, 66%, 67%, 68%, 69%, 70%, 71%, 72%, 73%, 74%, 75%, 76%, 77%, 78%, 79%, 80%, 81%, 82%, 83%, 84%, 85%, 86%, 87%, 88%, 89%, 90%, 91%, 92%, 93%, 94%, 95%, 96%, 97%, 98%, or 99% or more sequence identity to the sequence located between amino acid 1 and 99 of SEQ ID NO: 763.

[0283] Preferably, the XPG_I domain of an EXO-1 polypeptide has, in increasing order of preference at least, 49%, 50%, 51%, 52%, 53%, 54%, 55%, 56%, 57%, 58%, 59%, 60%, 61%, 62%, 63%, 64%, 65%, 66%, 67%, 68%, 69%, 70%, 71%, 72%, 73%, 74%, 75%, 76%, 77%, 78%, 79%, 80%, 81%, 82%, 83%, 84%, 85%, 86%, 87%, 88%, 89%, 90%, 91%, 92%, 93%, 94%, 95%, 96%, 97%, 98%, or 99% or more sequence identity to the sequence located between amino acid 138 and 230 of SEQ ID NO: 763.

[0284] Preferably, the EXONUCLEASE 1 domain of an EXO-1 polypeptide has, in increasing order of preference at least, 49%, 50%, 51%, 52%, 53%, 54%, 55%, 56%, 57%, 58%, 59%, 60%, 61%, 62%, 63%, 64%, 65%, 66%, 67%, 68%, 69%, 70%, 71%, 72%, 73%, 74%, 75%, 76%, 77%, 78%, 79%, 80%, 81%, 82%, 83%, 84%, 85%, 86%, 87%, 88%, 89%, 90%, 91%, 92%, 93%, 94%, 95%, 96%, 97%, 98%, or 99% or more sequence identity to the sequence located between amino acid 17 and 333 of SEQ ID NO: 763.

[0285] Additionally or alternatively, the EXO-1 polypeptide useful in the methods of the invention comprises one or more sequence motifs having at least, in increasing order of preference 49%, 50%, 51%, 52%, 53%, 54%, 55%, 56%, 57%, 58%, 59%, 60%, 61%, 62%, 63%, 64%, 65%, 66%, 67%, 68%, 69%, 70%, 71%, 72%, 73%, 74%, 75%, 76%, 77%, 78%, 79%, 80%, 81%, 82%, 83%, 84%, 85%, 86%, 87%, 88%, 89%, 90%, 91%, 92%, 93%, 94%, 95%, 96%, 97%, 98%, or 99% or more sequence identity to any one or more of motifs 40 to 42:

Motif 40 (SEQ ID NO: 828):
G[QKC][RT]VA[VI]D[TA]YSWLH[KR][GA]A[YL]SC[SA]RE
LC[KEL]GLPT
Motif 41 (SEQ ID NO: 829):
Y[CF]M[HK]RVN[LM]L[RL]H[YH][GK][VI]KP[IV][LV]VFDG
GRLPMK[AS][DE][QTE] ENKR[AR]R[SK]RKENL[EA]RA[KR]
E[HL][ELW]
Motif 42 (SEQ ID NO: 830):
V[DQA]A[VI]ITEDSDL[IL][AP][FY]GC[PK]R[IV][IF]FK
[ML]D[KR][FYN]GQG

[0286] The above mentioned motifs were outlined using MEME algorithm (Bailey and Elkan, Proceedings of the Second International Conference on Intelligent Systems for Molecular Biology, pp. 28-36, AAAI Press, Menlo Park, Calif., 1994.)

[0287] Additionally or alternatively, the homologue of an EXO-1 protein has in increasing order of preference at least 25%, 26%, 27%, 28%, 29%, 30%, 31%, 32%, 33%, 34%, 35%, 36%, 37%, 38%, 39%, 40%, 41%, 42%, 43%, 44%, 45%, 46%, 47%, 48%, 49%, 50%, 51%, 52%, 53%, 54%, 55%, 56%, 57%, 58%, 59%, 60%, 61%, 62%, 63%, 64%, 65%, 66%, 67%, 68%, 69%, 70%, 71%, 72%, 73%, 74%, 75%, 76%, 77%, 78%, 79%, 80%, 81%, 82%, 83%, 84%, 85%, 86%, 87%, 88%, 89%, 90%, 91%, 92%, 93%, 94%, 95%, 96%, 97%, 98%, or 99% overall sequence identity to the amino acid represented by SEQ ID NO: 763, provided that the homologous protein comprises any one or more of the conserved motifs as outlined above. The overall sequence identity is determined using a global alignment algorithm, such as the Needleman Wunsch algorithm in the program GAP (GCG Wisconsin Package, Accelrys), preferably with default parameters and preferably with sequences of mature proteins (i.e. without taking into account secretion signals or transit peptides). Compared to overall sequence identity, the sequence identity will generally be higher when only conserved domains or motifs are considered. Preferably the motifs in an EXO-1 polypeptide have, in increasing order of preference, at least 70%, 71%, 72%, 73%, 74%, 75%, 76%, 77%, 78%, 79%, 80%, 81%, 82%, 83%, 84%, 85%, 86%, 87%, 88%, 89%, 90%, 91%, 92%, 93%, 94%, 95%, 96%, 97%, 98%, or 99% sequence identity to any one or more of the motifs represented by SEQ ID NO: 828 to SEQ ID NO: 830 (Motifs 40 to 42).

[0288] Preferably, the polypeptide sequence which when used in the construction of a phylogenetic tree, clusters with the group of EXO-1 polypeptides comprising the amino acid sequence represented by SEQ ID NO: 763 rather than with any other group.

[0289] In another embodiment a “protein useful in the methods of the invention” is taken to mean a YiAP2 polypeptide as defined herein. In another embodiment a “nucleic acid useful in the methods of the invention” is taken to mean a nucleic acid capable of encoding such a YiAP2 polypeptide. The nucleic acid to be introduced into a plant (and therefore useful in performing the methods of the invention) is any nucleic acid encoding the type of protein which will now be described, hereafter also named “YiAP2 nucleic acid” or “YiAP2 gene”.

[0290] A “YiAP2 polypeptide” as defined herein refers to any polypeptide comprising at least two AP2 domains (Pfam accession number PF00847; InterPro accession IPR001471) and anyone or more of the following motifs:

[0291] Motif 43 as represented by a motif having in increasing order of preference at least 50%, 51%, 52%, 53%, 54%, 55%, 56%, 57%, 58%, 59%, 60%, 61%, 62%, 63%, 64%, 65%, 66%, 67%, 68%, 69%, 70%, 71%, 72%, 73%, 74%, 75%, 76%, 77%, 78%, 79%, 80%, 81%, 82%, 83%, 84%, 85%, 86%, 87%, 88%, 89%, 90%, 91%, 92%, 93%, 94%, 95%, 96%, 97%, 98%, 99% or 100% sequence identity to EYIGSLR[R/G]KSSGFSRGVSKYRGVARHHHDGR WEARIGKVFGNKYLYLGT[Y/F] (SEQ ID NO: 890) or to any of the homologous region of Motif 43 as present in any of the polypeptides of Table A6, wherein amino acids between bracket represent alternative amino acids at that position;

[0292] Motif 44 as represented by a motif having in increasing order of preference at least 50%, 51%, 52%, 53%, 54%, 55%, 56%, 57%, 58%, 59%, 60%, 61%, 62%, 63%, 64%, 65%, 66%, 67%, 68%, 69%, 70%, 71%, 72%, 73%, 74%, 75%, 76%, 77%, 78%, 79%, 80%, 81%, 82%, 83%, 84%, 85%, 86%, 87%, 88%, 89%, 90%, 91%, 92%, 93%, 94%, 95%, 96%, 97%, 98%, 99% or 100% sequence identity to RKSVPRDSPPQRSSIYRGVTRHRWTGRYEAHL WDKNCWNESQNKKGRQVY (SEQ ID NO: 891) or to any of the homologous region of Motif 44 as present in any of the polypeptides of Table A6.

[0293] Motif 45 as represented by a motif having in increasing order of preference at least 50%, 51%, 52%, 53%, 54%, 55%, 56%, 57%, 58%, 59%, 60%, 61%, 62%, 63%, 64%, 65%, 66%, 67%, 68%, 69%, 70%, 71%, 72%, 73%, 74%, 75%, 76%, 77%, 78%, 79%, 80%, 81%, 82%, 83%, 84%, 85%, 86%, 87%, 88%, 89%, 90%, 91%, 92%, 93%, 94%, 95%, 96%, 97%, 98%, 99% or 100% sequence identity to YD[DN]EEAAA[RH]AYDLAALKYWG[QH]DTILNFPLS [NT]YEEEL[KV]EMEG (SEQ ID NO: 892) or to any of the homologous region of Motif 45 as present in any of the polypeptides of Table A6, wherein amino acids between bracket represent alternative amino acids at that position;

[0294] Motif 46 as represented by a motif having in increasing order of preference at least 50%, 51%, 52%, 53%, 54%, 55%, 56%, 57%, 58%, 59%, 60%, 61%, 62%, 63%, 64%, 65%, 66%, 67%, 68%, 69%, 70%, 71%, 72%, 73%, 74%, 75%, 76%, 77%, 78%, 79%, 80%, 81%, 82%, 83%, 84%, 85%, 86%, 87%, 88%, 89%, 90%, 91%, 92%, 93%, 94%, 95%, 96%, 97%, 98%, 99% or 100% sequence identity to ATQEEAA[TQ]AYD[MR]AAIEYRGLNAVTNFDLS [RK]YIKWLRPNNNQ (SEQ ID NO: 893) or to any of the homologous region of Motif 46 as present in any of the polypeptides of Table A6, wherein amino acids between bracket represent alternative amino acids at that position;

[0295] Motif 47 as represented by a motif having in increasing order of preference at least 50%, 51%, 52%, 53%, 54%, 55%, 56%, 57%, 58%, 59%, 60%, 61%, 62%, 63%, 64%, 65%, 66%, 67%, 68%, 69%, 70%, 71%, 72%, 73%, 74%, 75%, 76%, 77%, 78%, 79%, 80%, 81%, 82%, 83%, 84%, 85%, 86%, 87%, 88%, 89%, 90%, 91%, 92%, 93%, 94%, 95%, 96%, 97%, 98%, 99% or 100% sequence identity to [QE]SQ[KP][PN][RTQ][CTR][ST][FN]P[DNE][DN][IN][QN]T[YV][FT][ET][CK][TQ][DK] (SEQ ID NO: 894) or to any of the homologous region of Motif 47 as present in any of the polypeptides of Table A6, wherein amino acids between bracket represent alternative amino acids at that position;

[0296] Motif 48 as represented by a motif having in increasing order of preference at least 50%, 51%, 52%, 53%, 54%, 55%, 56%, 57%, 58%, 59%, 60%, 61%, 62%, 63%, 64%, 65%, 66%, 67%, 68%, 69%, 70%, 71%, 72%, 73%, 74%, 75%, 76%, 77%, 78%, 79%, 80%, 81%, 82%, 83%, 84%, 85%, 86%, 87%, 88%, 89%, 90%, 91%, 92%, 93%, 94%, 95%, 96%, 97%, 98%, 99% or 100% sequence identity to QS[SP]KFKE[MT][LV]E (SEQ ID NO: 895) or to any of the homologous region of Motif 48 as present in any of the polypeptides of Table A6, wherein amino acids between bracket represent alternative amino acids at that position.

[0297] Table 4a localises the homologous region of Motifs 43 to 48 in the polypeptides of Table A6. The length of the each motif as well as the amino acid coordinate labelling the start of motif is given.

[0298] Preferably A “YiAP2 polypeptide” comprises at least two AP2 domains (Pfam accession number PF00847; InterPro accession IPR001471) and in increasing order of preference at least 1, 2, 3, 4, 5, or all 6 motifs, more preferably motifs 43, 44 and 46.

TABLE 4a
Motifs 43 to 48 as present in the polypeptides of table A6.

| | YiAP2 | | | | | |
|---|---|---|---|---|---|---|
| | Motif Name | | | | | |
| | Motif 43 | Motif 44 | Motif 45 | Motif 46 | Motif 47 | Motif 48 |
| | Motif Length (in amino acid) | | | | | |
| | 50 | 50 | 41 | 41 | 21 | 10 |
| | Amino acid | Amino acid | Amino acid | Amino acid | Amino acid | Amino acid |
| | coordinate | coordinate | coordinate | coordinate | coordinate | coordinate |
| Name polypeptide | Start | Start | Start | Start | Start | Start |
| S.tuberosum_TC187592#1 | 142 | 44 | 97 | 192 | 369 | 314 |
| A.thaliana_AT1G16060.1#1 | 142 | 44 | 97 | 192 | 350 | 303 |
| O.sativa_LOC_Os08g34360. | 139 | 41 | 94 | 189 | 344 | 295 |
| Z.mays_TC386652#1 | 137 | 39 | 92 | 187 | 325 | 292 |
| G.hirsutum_TC125414#1 | 134 | 36 | 89 | 184 | 313 | 290 |
| R.communis_TA2948_3988#1 | 133 | 36 | 88 | 183 | 310 | 287 |
| R.communis_EG658396#1 | 133 | 36 | 88 | 183 | 310 | 287 |
| S.bicolor_Sb02g025080.1# | 132 | 36 | 87 | 182 | 308 | 287 |
| O.sativa_LOC_Os09g25600. | 131 | 35 | 86 | 181 | 303 | 283 |
| M.truncatula_AC126784_13 | 131 | 35 | 86 | 181 | 301 | 281 |
| G.max_Glyma17g07860.1#1 | 131 | 34 | 86 | 181 | 299 | 279 |
| Medtr_AP2 | 131 | 33 | 86 | 181 | 299 | 278 |
| V.vinifera_GSVIVT0001713 | 129 | 31 | 84 | 179 | 294 | 277 |
| C.sinensis_TC9216#1 | 128 | 30 | 83 | 178 | 275 | 277 |
| C.clementina_TC2567#1 | 128 | 30 | 83 | 178 | 238 | 277 |
| C.clementina_TC1922#1 | 128 | 30 | 83 | 178 | 226 | 277 |
| C.clementina_DY301305#1 | 128 | 30 | 83 | 178 | 10 | 275 |
| C.clementina_DY290073#1 | 128 | 30 | 83 | 178 | 7 | 265 |
| C.clementina_DY288437#1 | 128 | 30 | 83 | 178 | 7 | 232 |
| Aquilegia_sp_TC20979#1 | 128 | 30 | 83 | 178 | 7 | 228 |
| C.sinensis_EY655317#1 | 128 | 30 | 83 | 178 | 7 | 228 |
| C.sinensis_EY726128#1 | 128 | 30 | 83 | 178 | 7 | 6 |
| Triphysaria_sp_TC12598#1 | 128 | 30 | 83 | 178 | 7 | 6 |
| O.basilicum_TA1087_39350 | 126 | 28 | 81 | 176 | 7 | 6 |
| P.trichocarpa_800184#1 | 122 | 27 | 77 | 172 | 7 | 6 |
| G.max_Glyma07g02380.1#1 | 112 | 17 | 67 | 162 | 4 | 6 |

[0299] A PF00847 domain is also referred to as AP2 domain in the terminology of the pfam database (Pfam version 23.0 (July 2008, 10340 families) R. D. Finn, J. Tate, J. Mistry, P. C. Coggill, J. S. Sammut, H. R. Hotz, G. Ceric, K. Forslund, S. R. Eddy, E. L. Sonnhammer and A. Bateman Nucleic Acids Research (2008) Database Issue 36:D281-D288). A person skilled in the art could readily determine whether any amino acid sequence in question falls within the definition of a “YiAP2polypeptide” using known techniques and software to consult or search databases of conserved protein domains such as pfam. For Example Interpro database maybe searched as detailed in the Examples section herein.

[0300] PF00847 domain refers to a protein domain of approximately 60 amino acids long which typically occurs in proteins of plant origin.

[0301] Preferably an AP2 domain in a polypeptide useful in the methods of the invention comprises a protein domain having in increasing order of preference at least 70%, 71%, 72%, 73%, 74%, 75%, 76%, 77%, 78%, 79%, 80%, 81%, 82%, 83%, 84%, 85%, 86%, 87%, 88%, 89%, 90%, 91%, 92%, 93%, 94%, 95%, 96%, 97%, 98%, 99% or 100% sequence identity to any one or more of the following:
[0302] (i) the amino acid sequence located between amino acid coordinates 49 to 106 of SEQ ID NO: 836, which represent the N-terminal AP2 domain in SEQ ID NO: 836;
[0303] (ii) the sequence located between amino acid coordinates 148 to 200 of SEQ ID NO: 836, which represent the C-terminal AP2 domain in SEQ ID NO: 836;
[0304] (iii) the amino acid sequence of an AP2 domain as present in any of the polypeptides of Table A6.

[0305] Conserved motifs in YiAP2 polypeptides, such as Motifs 43 to 48 may be defined by using the algorithm MEME; Bailey and Elkan, Proceedings of the Second International Conference on Intelligent Systems for Molecular Biology, pp. 28-36, AAAI Press, Menlo Park, Calif., 1994, Bailey et al., Nucleic Acids Research, 34, W369-W373, 2006), with the set of sequences of Table A6.

[0306] Additionally or alternatively, the “YiAP2 polypeptide” useful in the methods of the invention, and when expressed in plants, is located in the nucleus. Preferably the “YiAP2 polypeptide” comprises a nuclear localisation signal. A person skilled in the art can readily determine whether an amino acid sequence in question comprises a comprises a nuclear localisation signal using known techniques and software such as for example SignalP as described in the Examples section herein.

[0307] Alternatively and preferably, the YiAP2 polypeptide refers to a homologue of any of the polypeptides of Table A6.

[0308] Preferably the homologue of an YiAP2 polypeptide comprises two or more AP2 domains having in increasing order of preference, at least 70%, 71%, 72%, 73%, 74%, 75%, 76%, 77%, 78%, 79%, 80%, 81%, 82%, 83%, 84%, 85%, 86%, 87%, 88%, 89%, 90%, 91%, 92%, 93%, 94%, 95%, 96%, 97%, 98%, 99% or 100% sequence identity to any one or more of the following:
[0309] (i) the amino acid sequence located between amino acid coordinates 49 to 106 of SEQ ID NO: 836, which represent the N-terminal AP2 domain in SEQ ID NO: 836;
[0310] (ii) the sequence located between amino acid coordinates 148 to 200 of SEQ ID NO: 836, which represent the C-terminal AP2 domain in SEQ ID NO: 836;
[0311] (iii) the amino acid sequence of an AP2 domain as present in any of the polypeptides of Table A6.

[0312] The AP2 domain is well known to a person skill in the art, and described extensively in databases such as pfam, interpro and smart (Bateman et al., Nucleic Acids Research 30(1): 276-280 (2002); Mulder et al., (2003) Nucl. Acids. Res. 31, 315-318; Letunic et al. (2006) Nucleic Acids Res 34, D257-D260). The sequence “xazGVpxzxhGxzWxucItcsxxxxxxxxxxttc IaLGoFsotytAAhAYDxAAhhhhGxxpAhhNFsxxxxtt” (SEQ ID NO: 897) represents a consensus sequence of an AP2 domain as provided in the SMART database. The accession number for the AP2 domain in the SMART database is SM00380. The non-capital small letters represent a code for groupings of amino acids. Amino acids within the same group share similar chemical properties. The description of the codes used for each amino acid grouping in the consensus sequence is given in table 4b. Any of the amino acids within one given group of Table 4b represents an alternative amino acid at the position where the corresponding groups code is indicated. The AP2 domain is around 60-70 amino acids in length and has DNA binding activity (Ohme-takagi and Shinshi; Plant Cell 1995; 7:173-182) and when these sequences are aligned, gaps and insertions, typically up to 5 amino acids, may be allowed. It for example binds to the GCC-box present in promoters of pathogenesis-related proteins (Liu et al. 2006. FEBS Lett. 580(5): 1303-8).

TABLE 4b
Description of the amino acid groups used in the
AP2 consensus sequence. “Group” refers to the amino acid classification,
“code” denotes the abbreviation code used for a group,
“residues” indicate the amino acids falling within in a given class.

| Group | code | Amino Acid Residues |
|---|---|---|
| alcohol | o | S,T |
| aliphatic | I | I,L,V |
| any | x | A,C,D,E,F,G,H,I,K,L,M,N,P,Q,R,S,T,V,W,Y |
| aromatic | a | F,H,W,Y |
| charged | c | D,E,H,K,R |
| hydrophobic | h | A,C,F,G,H,I,K,L,M,R,T,V,W,Y |
| negative | y | D,E |
| polar | p | C,D,E,H,K,N,Q,R,S,T |
| positive | z | H,K,R |
| small | s | A,C,D,G,N,P,S,T,V |
| tiny | u | A,G,S |
| turnlike | t | A,C,D,E,G,H,K,N,Q,R,S,T |

[0313] Additionally or alternatively, a YiAP2 protein has in increasing order of preference at least 90%, 91%, 92%, 93%, 94%, 95%, 96%, 97%, 98%, or 99% overall sequence identity to the amino acid represented by the consensus sequence of an AP2 domain as represented above (SEQ ID NO: 897).

[0314] Methods to identify an AP2 domain are described herein. Further details are given in the Examples section.

[0315] Additionally or alternatively, the homologue of an YiAP2 protein has in increasing order of preference at least 50%, 51%, 52%, 53%, 54%, 55%, 56%, 57%, 58%, 59%, 60%, 61%, 62%, 63%, 64%, 65%, 66%, 67%, 68%, 69%, 70%, 71%, 72%, 73%, 74%, 75%, 76%, 77%, 78%, 79%, 80%, 81%, 82%, 83%, 84%, 85%, 86%, 87%, 88%, 89%, 90%, 91%, 92%, 93%, 94%, 95%, 96%, 97%, 98%, 99% or 100% overall sequence identity to the amino acid represented by any of the polypeptides of Table A6 most preferably to SEQ ID NO: 836. The overall sequence identity is determined using a global alignment algorithm, such as the Needleman Wunsch algorithm in the program GAP (GCG Wisconsin Package, Accelrys), preferably with default parameters and preferably with sequences of mature proteins (i.e. without taking into account secretion signals or transit peptides). Compared to overall sequence identity, the sequence identity will generally be higher when only conserved domains or motifs are considered.

[0316] Preferably the YiAP2 polypeptide useful in the methods of the invention is capable of binding to a DNA fragment of at least 10, 20, 30, 50, 60, 70, 80, 90, 100, 200, 250, 500, 650, 750, 1000, 1500 nucleotides long comprising one or more GCC boxes (SEQ ID NO: 896: TAAGAGCCGCC) preferably to the promoter DNA fragment used by Ohme-takagi 1995. Methods to assay DNA binding of AP2 domains are well known in the art, for example as described by Yoh-Sakumaa 2002, Biochemical and Biophysical Research Communications, 290, 998-1009) and yeast one hybrid assay maybe used such as described in Middleton et al., 2007 (Plant Cell 19: 1221-1234) or in Kizis and Pages (Plant J. 2002; 30(6):679-89).

[0317] The terms “domain”, “signature” and “motif” are defined in the “definitions” section herein.

[0318] Furthermore, FSM1-like polypeptides (at least in their native form) typically have DNA-binding activity. Tools and techniques for measuring DNA-binding activity (e.g. gel retardation assays) are well known in the art. Further details are provided in Example 6.

[0319] In addition, FSM1-like polypeptides, when expressed in rice according to the methods of the present invention as outlined in Examples 7 and 8, give plants having increased yield related traits, in particular increased seed yield (Example 11).

[0320] Furthermore, PIF3-like polypeptides (at least in their native form) typically have protein binding activity. Tools and techniques for measuring protein binding activity are well known in the art, a well known example is the Yeast Two Hybrid assay. Further details are provided in Example 6.

[0321] In addition, PIF3-like polypeptides, when expressed in rice according to the methods of the present invention as outlined in Examples 7 and 8, give plants having increased yield related traits, in particular early vigour or increased seed yield.

[0322] Furthermore, UROD polypeptides (at least in their native form) typically have uroporphyrinogen II decarboxylase or UROD enzyme activity catalysing the following reaction:

uroporphyrinogen-III<=>4CO2+coproporphyrinogen III.

[0323] UROD is classified in Enzyme Classification code: EC.4.1.1.37.

[0324] Tools and techniques for measuring porphyrin activity are well known in the art and are mainly performed by chromatographic and spectral methods, such as HPLC and TLC (Jacobs and Jacobs, 1993, Plant Physiol. 101(4): 1181-1187) and Magnetic Circular Dichroism (Ivanetich et al., 1984, Clin Chem. 30(3): 391-4). The crystal structure of UROD in plants has been determined by Martins et al., 2001, J Biol Chem. 276(47): 44108-44116.

[0325] In addition, UROD polypeptides, when expressed in rice according to the methods of the present invention as outlined in the Examples section herein, give plants having increased yield related traits.

[0326] Furthermore, preferably the AS-MTT polypeptide typically have DNA binding activity. Tools and techniques for measuring DNA binding activity are well known in the art.

[0327] In addition, preferably AS-MTT polypeptides, when expressed in rice according to the methods of the present invention as outlined in the Examples section, give plants having increased yield related traits, preferably biomass or seed yield increase preferably when the plant is cultivated under (abiotic) stress conditions.

[0328] Furthermore, EXO-1 polypeptides (at least in their native form) typically have nuclease activity. Tools and techniques for measuring nuclease activity are well known in the art. Further details are provided in Example 6.

[0329] In addition, EXO-1 polypeptides, when expressed in rice according to the methods of the present invention as outlined in Examples 7 and 8, give plants having increased yield related traits, in particular increased biomass, erectness, height, greenness, root mass.

[0330] Furthermore, preferably the YiAP2 polypeptide typically have DNA binding activity. Tools and techniques for measuring DNA binding activity are well known in the art.

[0331] In addition, preferably YiAP2 polypeptides, when expressed in rice according to the methods of the present invention as outlined in the Examples section, give plants having increased yield related traits, preferably increased seed yield.

[0332] Concerning FSM1-like polypeptides, the present invention is illustrated by transforming plants with the nucleic acid sequence represented by SEQ ID NO: 1, encoding the polypeptide sequence of SEQ ID NO: 2. However, performance of the invention is not restricted to these sequences; the methods of the invention may advantageously be performed using any FSM1-like-encoding nucleic acid or FSM1-like polypeptide as defined herein.

[0333] Examples of nucleic acids encoding FSM1-like polypeptides are given in Table A1 of the Examples section herein. Such nucleic acids are useful in performing the methods of the invention. The amino acid sequences given in Table A1 of the Examples section are example sequences of orthologues and paralogues of the FSM1-like polypeptide represented by SEQ ID NO: 2, the terms “orthologues” and “paralogues” being as defined herein. Further orthologues and paralogues may readily be identified by performing a so-called reciprocal blast search as described in the definitions section; where the query sequence is SEQ ID NO: 1 or SEQ ID NO: 2, the second BLAST (back-BLAST) would be against Solanum lycopersicum sequences.

[0334] Concerning PIF3-like polypeptides, the present invention is illustrated by transforming plants with the nucleic acid sequence represented by SEQ ID NO: 292, encoding the polypeptide sequence of SEQ ID NO: 293. However, performance of the invention is not restricted to these sequences; the methods of the invention may advantageously be performed using any PIF3-like-encoding nucleic acid or PIF3-like polypeptide as defined herein.

[0335] Examples of nucleic acids encoding PIF3-like polypeptides are given in Table A2 of the Examples section herein. Such nucleic acids are useful in performing the methods of the invention. The amino acid sequences given in Table A2 of the Examples section are example sequences of orthologues and paralogues of the PIF3-like polypeptide represented by SEQ ID NO: 293, the terms “orthologues” and “paralogues” being as defined herein. Further orthologues and paralogues may readily be identified by performing a so-called reciprocal blast search as described in the definitions section; where the query sequence is SEQ ID NO: 292 or SEQ ID NO: 293, the second BLAST (back-BLAST) would be against rice sequences.

[0336] Concerning UROD polypeptides, the present invention is illustrated by transforming plants with the nucleic acid sequence represented by SEQ ID NO: 367, encoding the polypeptide sequence of SEQ ID NO: 368. However, performance of the invention is not restricted to these sequences; the methods of the invention may advantageously be performed using any UROD-encoding nucleic acid or UROD polypeptide as defined herein.

[0337] Examples of nucleic acids encoding UROD polypeptides are given in Table A3 of the Examples section herein. Such nucleic acids are useful in performing the methods of the invention. The amino acid sequences given in Table A3 of the Examples section are example sequences of orthologues and paralogues of the UROD polypeptide represented by SEQ ID NO: 368, the terms “orthologues” and “paralogues” being as defined herein. Further orthologues and paralogues may readily be identified by performing a so-called reciprocal blast search as described in the definitions section; where the query sequence is SEQ ID NO: 367 or SEQ ID NO: 368, the second BLAST (back-BLAST) would be against Poplar sequences.

[0338] Concerning AS-MTT polypeptides, the present invention is illustrated by transforming plants with the nucleic acid sequence represented by SEQ ID NO: 536, encoding the polypeptide sequence of SEQ ID NO: 537. However, performance of the invention is not restricted to these sequences; the methods of the invention may advantageously be performed using any AS-MTT-encoding nucleic acid or AS-MTT polypeptide as defined herein.

[0339] Examples of nucleic acids encoding AS-MTT polypeptides are given in Table A4 of the Examples section herein. Such nucleic acids are useful in performing the methods of the invention. The amino acid sequences given in Table A4 of the Examples section are example sequences of orthologues and paralogues of the AS-MTT polypeptide represented by SEQ ID NO: 537, the terms “orthologues” and “paralogues” being as defined herein. Further orthologues and paralogues may readily be identified by performing a so-called reciprocal blast search as described in the definitions section; where the query sequence is SEQ ID NO: 536 or SEQ ID NO: 537, the second BLAST (back-BLAST) would be against poplar sequences.

[0340] Concerning EXO-1 polypeptides, the present invention is illustrated by transforming plants with the nucleic acid sequence represented by SEQ ID NO: 762, encoding the polypeptide sequence of SEQ ID NO: 763. However, performance of the invention is not restricted to these sequences; the methods of the invention may advantageously be performed using any EXO-1-encoding nucleic acid or EXO-1 polypeptide as defined herein.

[0341] Examples of nucleic acids encoding EXO-1 polypeptides are given in Table AS of the Examples section herein. Such nucleic acids are useful in performing the methods of the invention. The amino acid sequences given in Table AS of the Examples section are example sequences of orthologues and paralogues of the EXO-1 polypeptide represented by SEQ ID NO: 763, the terms “orthologues” and “paralogues” being as defined herein. Further orthologues and paralogues may readily be identified by performing a so-called reciprocal blast search as described in the definitions section; where the query sequence is SEQ ID NO: 762 or SEQ ID NO: 763, the second BLAST (back-BLAST) would be against Populus trichocarpa sequences.

[0342] Concerning YiAP2 polypeptides, the present invention is illustrated by transforming plants with the nucleic acid sequence represented by SEQ ID NO: 835, encoding the polypeptide sequence of SEQ ID NO: 836. However, performance of the invention is not restricted to these sequences; the methods of the invention may advantageously be performed using any YiAP2-encoding nucleic acid or YiAP2 polypeptide as defined herein.

[0343] Examples of nucleic acids encoding YiAP2 polypeptides are given in Table A6 of the Examples section herein. Such nucleic acids are useful in performing the methods of the invention. The amino acid sequences given in Table A6 of the Examples section are example sequences of orthologues and paralogues of the YiAP2 polypeptide represented by SEQ ID NO: 836, the terms “orthologues” and “paralogues” being as defined herein. Further orthologues and paralogues may readily be identified by performing a so-called reciprocal blast search as described in the definitions section; where the query sequence is SEQ ID NO: 835 or SEQ ID NO: 836, the second BLAST (back-BLAST) would be against Medicago truncatula sequences.

[0344] Nucleic acid variants may also be useful in practising the methods of the invention. Examples of such variants include nucleic acids encoding homologues and derivatives of any one of the amino acid sequences given in Table A1 to A6 of the Examples section, the terms “homologue” and “derivative” being as defined herein. Also useful in the methods of the invention are nucleic acids encoding homologues and derivatives of orthologues or paralogues of any one of the amino acid sequences given in Table A1 to A6 of the Examples section. Homologues and derivatives useful in the methods of the present invention have substantially the same biological and functional activity as the unmodified protein from which they are derived. Further variants useful in practising the methods of the invention are variants in which codon usage is optimised or in which miRNA target sites are removed.

[0345] Further nucleic acid variants useful in practising the methods of the invention include portions of nucleic acids encoding FSM1-like polypeptides, or PIF3-like polypeptides, or UROD polypeptides, or AS-MTT polypeptides, or EXO-1 polypeptides, or YiAP2 polypeptides, nucleic acids hybridising to nucleic acids encoding FSM1-like polypeptides, or PIF3-like polypeptides, or UROD polypeptides, or AS-MTT polypeptides, or EXO-1 polypeptides, or YiAP2 polypeptides, splice variants of nucleic acids encoding FSM1-like polypeptides, or PIF3-like polypeptides, or UROD polypeptides, or AS-MTT polypeptides, or EXO-1 polypeptides, or YiAP2 polypeptides, allelic variants of nucleic acids encoding FSM1-like polypeptides, or PIF3-like polypeptides, or UROD polypeptides, or AS-MTT polypeptides, or EXO-1 polypeptides, or YiAP2 polypeptides, and variants of nucleic acids encoding FSM1-like polypeptides, or PIF3-like polypeptides, or UROD polypeptides, or AS-MTT polypeptides, or EXO-1 polypeptides, or YiAP2 polypeptides, obtained by gene shuffling. The terms hybridising sequence, splice variant, allelic variant and gene shuffling are as described herein.

[0346] Nucleic acids encoding FSM1-like polypeptides, or PIF3-like polypeptides, or UROD polypeptides, or AS-MTT polypeptides, or EXO-1 polypeptides, or YiAP2 polypeptides, need not be full-length nucleic acids, since performance of the methods of the invention does not rely on the use of full-length nucleic acid sequences. According to the present invention, there is provided a method for enhancing yield-related traits in plants, comprising introducing and expressing in a plant a portion of any one of the nucleic acid sequences given in Table A1 to A6 of the Examples section, or a portion of a nucleic acid encoding an orthologue, paralogue or homologue of any of the amino acid sequences given in Table A of the Examples section.

[0347] A portion of a nucleic acid may be prepared, for example, by making one or more deletions to the nucleic acid. The portions may be used in isolated form or they may be fused to other coding (or non-coding) sequences in order to, for example, produce a protein that combines several activities. When fused to other coding sequences, the resultant polypeptide produced upon translation may be bigger than that predicted for the protein portion.

[0348] Concerning FSM1-like polypeptides, portions useful in the methods of the invention, encode a FSM1-like polypeptide as defined herein, and have substantially the same biological activity as the amino acid sequences given in Table A1 of the Examples section. Preferably, the portion is a portion of any one of the nucleic acids given in Table A1 of the Examples section, or is a portion of a nucleic acid encoding an orthologue or paralogue of any one of the amino acid sequences given in Table A1 of the Examples section. Preferably the portion is at least 150, 200, 250, 300, 350, 400 consecutive nucleotides in length, the consecutive nucleotides being of any one of the nucleic acid sequences given in Table A1 of the Examples section, or of a nucleic acid encoding an orthologue or paralogue of any one of the amino acid sequences given in Table A1 of the Examples section. Most preferably the portion is a portion of the nucleic acid of SEQ ID NO: 1. Preferably, the portion encodes a fragment of an amino acid sequence comprising a MYB/SANT domain, which when used in the construction of a phylogenetic tree, clusters with the group of FSM1-like polypeptides comprising the amino acid sequence represented by SEQ ID NO: 2 rather than with other MYB proteins and which comprises one or more of the motifs 1 to 6 as outlined above.

[0349] Concerning PIF3-like polypeptides, portions useful in the methods of the invention, encode a PIF3-like polypeptide as defined herein, and have substantially the same biological activity as the amino acid sequences given in Table A2 of the Examples section. Preferably, the portion is a portion of any one of the nucleic acids given in Table A2 of the Examples section, or is a portion of a nucleic acid encoding an orthologue or paralogue of any one of the amino acid sequences given in Table A2 of the Examples section. Preferably the portion is at least 500, 550, 600, 650, 700, 750, 800, 850, 900, 950, 1000, 1050, 1100, 1150, 1200, 1250, 1300, 1350, 1400, 1450, 1500, 1550, 1600, 1650, 1700, 1750, 1800, 1850, 1900, 1950, 2000, 2050, 2100, 2150, 2200 consecutive nucleotides in length, the consecutive nucleotides being of any one of the nucleic acid sequences given in Table A2 of the Examples section, or of a nucleic acid encoding an orthologue or paralogue of any one of the amino acid sequences given in Table A2 of the Examples section. Most preferably the portion is a portion of the nucleic acid of SEQ ID NO: 292. Preferably, the portion encodes a fragment of an amino acid sequence which comprises one or more of the motifs as defined above and which, when used in the construction of a phylogenetic tree, clusters with the group of PIF3-like polypeptides comprising the amino acid sequence represented by SEQ ID NO: 293 rather than with any other group of bHLH proteins.

[0350] Concerning UROD polypeptides, portions useful in the methods of the invention, encode a UROD polypeptide as defined herein, and have substantially the same biological activity as the amino acid sequences given in Table A3 of the Examples section. Preferably, the portion is a portion of any one of the nucleic acids given in Table A3 of the Examples section, or is a portion of a nucleic acid encoding an orthologue or paralogue of any one of the amino acid sequences given in Table A3 of the Examples section. Preferably the portion is at least 500, 550, 600, 650, 700, 750, 800, 850, 900, 950, 1000, 1050, 1100, 1150, 1200, 1250 consecutive nucleotides in length, the consecutive nucleotides being of any one of the nucleic acid sequences given in Table A3 of the Examples section, or of a nucleic acid encoding an orthologue or paralogue of any one of the amino acid sequences given in Table A3 of the Examples section. Most preferably the portion is a portion of the nucleic acid of SEQ ID NO: 367. Preferably, the portion encodes a fragment of an amino acid sequence which, when used in the construction of a phylogenetic tree, clusters with the group of UROD polypeptides comprising the amino acid sequence represented by SEQ ID NO: 368 rather than with any other group and may further comprise any one or more of Motifs 13 to 30.

[0351] Concerning AS-MTT polypeptides, portions useful in the methods of the invention, encode an AS-MTT polypeptide as defined herein, and have substantially the same biological activity as the amino acid sequences given in Table A4 of the Examples section. Preferably, the portion is a portion of any one of the nucleic acids given in Table A4 of the Examples section, or is a portion of a nucleic acid encoding an orthologue or paralogue of any one of the amino acid sequences given in Table A4 of the Examples section. Preferably the portion is at least 80, 90, 100, 120, 150, 200, 250, 300, 400, 500, 550, 600, 650, 700, 750, 800, 850, 900, 950, 1000, 1050 consecutive nucleotides in length, the consecutive nucleotides being of any one of the nucleic acid sequences given in Table A4 of the Examples section, or of a nucleic acid encoding an orthologue or paralogue of any one of the amino acid sequences given in Table A4 of the Examples section. Most preferably the portion is a portion of the nucleic acid of SEQ ID NO: 536. Preferably, the portion encodes a fragment of an amino acid sequence which, when used in the construction of a phylogenetic tree, clusters within Clade A, preferably with the polypeptide represented by SEQ ID NO: 537.

[0352] Concerning EXO-1 polypeptides, portions useful in the methods of the invention, encode an EXO-1 polypeptide as defined herein, and have substantially the same biological activity as the amino acid sequences given in Table A5 of the Examples section. Preferably, the portion is a portion of any one of the nucleic acids given in Table A5 of the Examples section, or is a portion of a nucleic acid encoding an orthologue or paralogue of any one of the amino acid sequences given in Table AS of the Examples section. Preferably the portion is at least 500, 550, 600, 650, 700, 750, 800, 850, 900, 950, 1000, 1250, 1500, 1750, 2000, 2250, 2500, 2750, 3000, 3250, 3500, 3750, 4000, 4250, 4500, 4750, 5000 consecutive nucleotides in length, the consecutive nucleotides being of any one of the nucleic acid sequences given in Table AS of the Examples section, or of a nucleic acid encoding an orthologue or paralogue of any one of the amino acid sequences given in Table AS of the Examples section. Most preferably the portion is a portion of the nucleic acid of SEQ ID NO: 762. Preferably, the portion encodes a fragment of an amino acid sequence which, when used in the construction of a phylogenetic tree, clusters with the group of EXO-1 polypeptides comprising the amino acid sequence represented by SEQ ID NO: 763 rather than with any other group and/or comprises motifs 40 to 42 and/or has nuclease activity and/or has at least 20% sequence identity to SEQ ID NO: 763.

[0353] Concerning YiAP2 polypeptides, portions useful in the methods of the invention, encode a YiAP2 polypeptide as defined herein, and have substantially the same biological activity as the amino acid sequences given in Table A6 of the Examples section. Preferably, the portion is a portion of any one of the nucleic acids given in Table A6 of the Examples section, or is a portion of a nucleic acid encoding an orthologue or paralogue of any one of the amino acid sequences given in Table A of the Examples section. Preferably the portion is at least 50, 100, 200, 300, 400, 500, 550, 600, 650, 700, 750, 800, 850, 900, 950, 1000, 1050, 1100, 1150, 1200 consecutive nucleotides in length, the consecutive nucleotides being of any one of the nucleic acid sequences given in Table A6 of the Examples section, or of a nucleic acid encoding an orthologue or paralogue of any one of the amino acid sequences given in Table A6 of the Examples section. Most preferably the portion is a portion of the nucleic acid of SEQ ID NO: 835. Preferably, the portion encodes a fragment of an amino acid sequence comprising at least Two AP2 domains and at least one of motifs I to VI as described above.

[0354] Another nucleic acid variant useful in the methods of the invention is a nucleic acid capable of hybridising, under reduced stringency conditions, preferably under stringent conditions, with a nucleic acid encoding a FSM1-like polypeptide, or a PIF3 polypeptide, or a UROD polypeptide, or an AS-MTT polypeptide, or an EXO-1 polypeptide, or a YiAP2 polypeptide, as defined herein, or with a portion as defined herein.

[0355] According to the present invention, there is provided a method for enhancing yield-related traits in plants, comprising introducing and expressing in a plant a nucleic acid capable of hybridizing to any one of the nucleic acids given in Table A1 to A6 of the Examples section, or comprising introducing and expressing in a plant a nucleic acid capable of hybridising to a nucleic acid encoding an orthologue, paralogue or homologue of any of the nucleic acid sequences given in Table A1 to A6 of the Examples section.

[0356] Concerning FSM1-like polypeptides, hybridising sequences useful in the methods of the invention encode a FSM1-like polypeptide as defined herein, having substantially the same biological activity as the amino acid sequences given in Table A1 of the Examples section. Preferably, the hybridising sequence is capable of hybridising to the complement of any one of the nucleic acids given in Table A1 of the Examples section, or to a portion of any of these sequences, a portion being as defined above, or the hybridising sequence is capable of hybridising to the complement of a nucleic acid encoding an orthologue or paralogue of any one of the amino acid sequences given in Table A1 of the Examples section. Most preferably, the hybridising sequence is capable of hybridising to the complement of a nucleic acid as represented by SEQ ID NO: 1 or to a portion thereof.

[0357] Preferably, the hybridising sequence encodes a polypeptide comprising a MYB/SANT domain and with an amino acid sequence which, when used in the construction of a phylogenetic tree, clusters with the group of FSM1-like polypeptides comprising the amino acid sequence represented by SEQ ID NO: 2 rather than with other MYB proteins and which comprises one or more of the motifs 1 to 6 as outlined above.

[0358] Concerning PIF3-like polypeptides, hybridising sequences useful in the methods of the invention encode a PIF3-like polypeptide as defined herein, having substantially the same biological activity as the amino acid sequences given in Table A2 of the Examples section. Preferably, the hybridising sequence is capable of hybridising to the complement of any one of the nucleic acids given in Table A2 of the Examples section, or to a portion of any of these sequences, a portion being as defined above, or the hybridising sequence is capable of hybridising to the complement of a nucleic acid encoding an orthologue or paralogue of any one of the amino acid sequences given in Table A2 of the Examples section. Most preferably, the hybridising sequence is capable of hybridising to the complement of a nucleic acid as represented by SEQ ID NO: 292 or to a portion thereof.

[0359] Preferably, the hybridising sequence encodes a polypeptide with an amino acid sequence which comprises one or more of the motifs as defined above and which, when used in the construction of a phylogenetic tree, clusters with the group of PIF3-like polypeptides comprising the amino acid sequence represented by SEQ ID NO: 293 rather than with any other group of bHLH proteins.

[0360] Concerning UROD polypeptides, hybridising sequences useful in the methods of the invention encode a UROD polypeptide as defined herein, having substantially the same activity as the amino acid sequences given in Table A3 of the Examples section. Preferably, the hybridising sequence is capable of hybridising to the complement of any one of the nucleic acids given in Table A3 of the Examples section, or to a portion of any of these sequences, a portion being as defined above, or the hybridising sequence is capable of hybridising to the complement of a nucleic acid encoding an orthologue or paralogue of any one of the amino acid sequences given in Table A3 of the Examples section. Most preferably, the hybridising sequence is capable of hybridising to the complement of a nucleic acid as represented by SEQ ID NO: 367 or to a portion thereof.

[0361] Preferably, the hybridising sequence encodes a polypeptide with an amino acid sequence which, when full-length and used in the construction of a phylogenetic tree, clusters with the group of UROD polypeptides comprising the amino acid sequence represented by SEQ ID NO: 368 rather than with any other group and comprises any one or more of Motifs 13 to 30.

[0362] Concerning AS-MTT polypeptides, hybridising sequences useful in the methods of the invention encode an AS-MTT polypeptide as defined herein, having substantially the same biological activity as the amino acid sequences given in Table A4 of the Examples section. Preferably, the hybridising sequence is capable of hybridising to the complement of any one of the nucleic acids given in Table A4 of the Examples section, or to a portion of any of these sequences, a portion being as defined above, or the hybridising sequence is capable of hybridising to the complement of a nucleic acid encoding an orthologue or paralogue of any one of the amino acid sequences given in Table A4 of the Examples section. Most preferably, the hybridising sequence is capable of hybridising to the complement of a nucleic acid as represented by SEQ ID NO: 536 or to a portion thereof.

[0363] Preferably, the hybridising sequence encodes a polypeptide with an amino acid sequence which, when full-length and used in the construction of a phylogenetic tree, clusters within Clade A, preferably with the polypeptide represented by SEQ ID NO: 537.

[0364] Concerning EXO-1 polypeptides, hybridising sequences useful in the methods of the invention encode an EXO-1 polypeptide as defined herein, having substantially the same biological activity as the amino acid sequences given in Table A5 of the Examples section. Preferably, the hybridising sequence is capable of hybridising to the complement of any one of the nucleic acids given in Table A5 of the Examples section, or to a portion of any of these sequences, a portion being as defined above, or the hybridising sequence is capable of hybridising to the complement of a nucleic acid encoding an orthologue or paralogue of any one of the amino acid sequences given in Table A5 of the Examples section. Most preferably, the hybridising sequence is capable of hybridising to the complement of a nucleic acid as represented by SEQ ID NO: 762 or to a portion thereof.

[0365] Preferably, the hybridising sequence encodes a polypeptide with an amino acid sequence which, when full-length and used in the construction of a phylogenetic tree, clusters with the group of EXO-1 polypeptides comprising the amino acid sequence represented by SEQ ID NO: 763 rather than with any other group group an/or comprises motifs 40 to 42 and/or has nuclease activity and/or has at least 20% sequence identity to SEQ ID NO: 762.

[0366] Hybridising sequences useful in the methods of the invention encode a YiAP2 polypeptide as defined herein, having substantially the same biological activity as the amino acid sequences given in Table A6 of the Examples section. Preferably, the hybridising sequence is capable of hybridising to the complement of any one of the nucleic acids given in Table A6 of the Examples section, or to a portion of any of these sequences, a portion being as defined above, or the hybridising sequence is capable of hybridising to the complement of a nucleic acid encoding an orthologue or paralogue of any one of the amino acid sequences given in Table A6 of the Examples section. Most preferably, the hybridising sequence is capable of hybridising to the complement of a nucleic acid as represented by SEQ ID NO: 835 or to a portion thereof.

[0367] Preferably, the hybridising sequence encodes a polypeptide with an amino acid sequence comprising at least two AP2 domains and at least one of motifs 43 to 48 as described above.

[0368] Another nucleic acid variant useful in the methods of the invention is a splice variant encoding a FSM1-like polypeptide, or a PIF3 polypeptide, or a UROD polypeptide, or an AS-MTT polypeptide, or an EXO-1 polypeptide, or a YiAP2 polypeptide, as defined hereinabove, a splice variant being as defined herein.

[0369] According to the present invention, there is provided a method for enhancing yield-related traits in plants, comprising introducing and expressing in a plant a splice variant of any one of the nucleic acid sequences given in Table A1 to A6 of the Examples section, or a splice variant of a nucleic acid encoding an orthologue, paralogue or homologue of any of the amino acid sequences given in Table A1 to A6 of the Examples section.

[0370] Concerning FSM1-like polypeptides, preferred splice variants are splice variants of a nucleic acid represented by SEQ ID NO: 1, or a splice variant of a nucleic acid encoding an orthologue or paralogue of SEQ ID NO: 2. Preferably, the amino acid sequence encoded by the splice variant comprises a MYB/SANT domain and has a sequence which, when used in the construction of a phylogenetic tree, clusters with the group of FSM1-like polypeptides comprising the amino acid sequence represented by SEQ ID NO: 2 rather than with other MYB proteins, and which comprises one or more of the motifs 1 to 6 as outlined above.

[0371] Concerning PIF3-like polypeptides, preferred splice variants are splice variants of a nucleic acid represented by SEQ ID NO: 292, or a splice variant of a nucleic acid encoding an orthologue or paralogue of SEQ ID NO: 293. Preferably, the amino acid sequence encoded by the splice variant comprises one or more of the motifs as defined above and, when used in the construction of a phylogenetic tree, clusters with the group of PIF3-like polypeptides comprising the amino acid sequence represented by SEQ ID NO: 293 rather than with any other group of bHLH proteins.

[0372] Concerning UROD polypeptides, preferred splice variants are splice variants of a nucleic acid represented by SEQ ID NO: 367, or a splice variant of a nucleic acid encoding an orthologue or paralogue of SEQ ID NO: 368. Preferably, the amino acid sequence encoded by the splice variant, when used in the construction of a phylogenetic tree, clusters with the group of UROD polypeptides comprising the amino acid sequence represented by SEQ ID NO: 368 rather than with any other group and comprises any one or more of Motifs 13 to 30.

[0373] Concerning AS-MTT polypeptides, preferred splice variants are splice variants of a nucleic acid represented by SEQ ID NO: 536, or a splice variant of a nucleic acid encoding an orthologue or paralogue of SEQ ID NO: 537. Preferably, the amino acid sequence encoded by the splice variant, when used in the construction of a phylogenetic tree, clusters within Clade A, preferably with the polypeptide represented by SEQ ID NO: 537.

[0374] Concerning EXO-1 polypeptides, preferred splice variants are splice variants of a nucleic acid represented by SEQ ID NO: 762, or a splice variant of a nucleic acid encoding an orthologue or paralogue of SEQ ID NO: 763. Preferably, the amino acid sequence encoded by the splice variant, when used in the construction of a phylogenetic tree, clusters with the group of EXO-1 polypeptides nucleases comprising the amino acid sequence represented by SEQ ID NO: 763 rather than with any other group and/or comprises motifs 40 to 42 and/or has nuclease activity and/or has at least 20% sequence identity to SEQ ID NO: 763.

[0375] Concerning YiAP2 polypeptides, preferred splice variants are splice variants of a nucleic acid represented by SEQ ID NO: 835, or a splice variant of a nucleic acid encoding an orthologue or paralogue of SEQ ID NO: 836. Preferably, the amino acid sequence encoded by the splice variant comprises at least two AP2 domains and at least one of motifs 43 to 48 as described above.

[0376] Another nucleic acid variant useful in performing the methods of the invention is an allelic variant of a nucleic acid encoding a FSM1-like polypeptide, or a PIF3 polypeptide, or a UROD polypeptide, or an AS-MTT polypeptide, or an EXO-1 polypeptide, or a YiAP2 polypeptide, as defined hereinabove, an allelic variant being as defined herein.

[0377] According to the present invention, there is provided a method for enhancing yield-related traits in plants, comprising introducing and expressing in a plant an allelic variant of any one of the nucleic acids given in Table A1 to A6 of the Examples section, or comprising introducing and expressing in a plant an allelic variant of a nucleic acid encoding an orthologue, paralogue or homologue of any of the amino acid sequences given in Table A1 to A6 of the Examples section.

[0378] Concerning FSM1-like polypeptides, the polypeptides encoded by allelic variants useful in the methods of the present invention have substantially the same biological activity as the FSM1-like polypeptide of SEQ ID NO: 2 and any of the amino acids depicted in Table A1 of the Examples section. Allelic variants exist in nature, and encompassed within the methods of the present invention is the use of these natural alleles. Preferably, the allelic variant is an allelic variant of SEQ ID NO: 1 or an allelic variant of a nucleic acid encoding an orthologue or paralogue of SEQ ID NO: 2. Preferably, the amino acid sequence encoded by the allelic variant comprises a MYB/SANT domain and has a sequence which, when used in the construction of a phylogenetic tree, clusters with the group of FSM1-like polypeptides comprising the amino acid sequence represented by SEQ ID NO: 2 rather than with other MYB proteins and which comprises one or more of the motifs 1 to 6 as outlined above.

[0379] Concerning PIF3-like polypeptides, the polypeptides encoded by allelic variants useful in the methods of the present invention have substantially the same biological activity as the PIF3-like polypeptide of SEQ ID NO: 293 and any of the amino acids depicted in Table A2 of the Examples section. Allelic variants exist in nature, and encompassed within the methods of the present invention is the use of these natural alleles. Preferably, the allelic variant is an allelic variant of SEQ ID NO: 292 or an allelic variant of a nucleic acid encoding an orthologue or paralogue of SEQ ID NO: 293. Preferably, the amino acid sequence encoded by the allelic variant comprises one or more of the motifs as defined above and, when used in the construction of a phylogenetic tree, clusters with the group of PIF3-like polypeptides comprising the amino acid sequence represented by SEQ ID NO: 293 rather than with any other group of bHLH proteins.

[0380] Concerning UROD polypeptides, the polypeptides encoded by allelic variants useful in the methods of the present invention have substantially the same biological activity as the UROD polypeptide of SEQ ID NO: 368 and any of the amino acids depicted in Table A3 of the Examples section. Allelic variants exist in nature, and encompassed within the methods of the present invention is the use of these natural alleles. Preferably, the allelic variant is an allelic variant of SEQ ID NO: 367 or an allelic variant of a nucleic acid encoding an orthologue or paralogue of SEQ ID NO: 368. Preferably, the amino acid sequence encoded by the allelic variant, when used in the construction of a phylogenetic tree, clusters with the UROD polypeptides comprising the amino acid sequence represented by SEQ ID NO: 368 rather than with any other group and comprises any one or more of Motifs 13 to 30.

[0381] Concerning AS-MTT polypeptides, the polypeptides encoded by allelic variants useful in the methods of the present invention have substantially the same biological activity as the AS-MTT polypeptide of SEQ ID NO: 537 and any of the amino acids depicted in Table A4 of the Examples section. Allelic variants exist in nature, and encompassed within the methods of the present invention is the use of these natural alleles. Preferably, the allelic variant is an allelic variant of SEQ ID NO: 536 or an allelic variant of a nucleic acid encoding an orthologue or paralogue of SEQ ID NO: 537. Preferably, the amino acid sequence encoded by the allelic variant, when used in the construction of a phylogenetic tree, clusters within Clade A, preferably with the polypeptide represented by SEQ ID NO: 537.

[0382] Concerning EXO-1 polypeptides, the polypeptides encoded by allelic variants useful in the methods of the present invention have substantially the same biological activity as the EXO-1 polypeptide of SEQ ID NO: 763 and any of the amino acids depicted in Table AS of the Examples section. Allelic variants exist in nature, and encompassed within the methods of the present invention is the use of these natural alleles. Preferably, the allelic variant is an allelic variant of SEQ ID NO: 762 or an allelic variant of a nucleic acid encoding an orthologue or paralogue of SEQ ID NO: 763. Preferably, the amino acid sequence encoded by the allelic variant, when used in the construction of a phylogenetic tree, clusters with the EXO-1 polypeptides nucleases comprising the amino acid sequence represented by SEQ ID NO: 763 rather than with any other group and/or comprises motifs 40 to 42 and/or has nuclease activity and/or has at least 20% sequence identity to SEQ ID NO: 763.

[0383] Concerning YiAP2 polypeptides, the polypeptides encoded by allelic variants useful in the methods of the present invention have substantially the same biological activity as the YiAP2 polypeptide of SEQ ID NO: 836 and any of the amino acids depicted in Table A6 of the Examples section. Allelic variants exist in nature, and encompassed within the methods of the present invention is the use of these natural alleles. Preferably, the allelic variant is an allelic variant of SEQ ID NO: 835 or an allelic variant of a nucleic acid encoding an orthologue or paralogue of SEQ ID NO: 836. Preferably, the amino acid sequence encoded by the allelic variant comprises at least two AP2 domains and at least one of motifs 43 to 48 as described above.

[0384] Gene shuffling or directed evolution may also be used to generate variants of nucleic acids encoding FSM1-like polypeptides, or PIF3-like polypeptides, or UROD polypeptides, or AS-MTT polypeptides, or EXO-1 polypeptides, or YiAP2 polypeptides, as defined above; the term “gene shuffling” being as defined herein.

[0385] According to the present invention, there is provided a method for enhancing yield-related traits in plants, comprising introducing and expressing in a plant a variant of any one of the nucleic acid sequences given in Table A1 to A6 of the Examples section, or comprising introducing and expressing in a plant a variant of a nucleic acid encoding an orthologue, paralogue or homologue of any of the amino acid sequences given in Table A1 to A6 of the Examples section, which variant nucleic acid is obtained by gene shuffling.

[0386] Concerning FSM1-like polypeptides, preferably, the amino acid sequence encoded by the variant nucleic acid obtained by gene shuffling comprises a MYB/SANT domain and has a sequence which, when used in the construction of a phylogenetic tree, clusters with the group of FSM1-like polypeptides comprising the amino acid sequence represented by SEQ ID NO: 2 rather than with other MYB proteins, and which comprises one or more of the motifs 1 to 6 as outlined above.

[0387] Concerning PIF3-like polypeptides, preferably, the amino acid sequence encoded by the variant nucleic acid obtained by gene shuffling comprises one or more of the motifs as defined above and, when used in the construction of a phylogenetic tree, clusters with the group of PIF3-like polypeptides comprising the amino acid sequence represented by SEQ ID NO: 293 rather than with any other group of bHLH proteins.

[0388] Concerning UROD polypeptides, preferably, the amino acid sequence encoded by the variant nucleic acid obtained by gene shuffling, when used in the construction of a phylogenetic tree, clusters with the group of UROD polypeptides comprising the amino acid sequence represented by SEQ ID NO: 368 rather than with any other group and comprises any one or more of Motifs 13 to 30.

[0389] Concerning AS-MTT polypeptides, preferably, the amino acid sequence encoded by the variant nucleic acid obtained by gene shuffling, when used in the construction of a phylogenetic tree, clusters within Clade A, preferably with the polypeptide represented by SEQ ID NO: 537.

[0390] Concerning EXO-1 polypeptides, preferably, the amino acid sequence encoded by the variant nucleic acid obtained by gene shuffling, when used in the construction of a phylogenetic tree, clusters with the group of EXO-1 polypeptides nucleases comprising the amino acid sequence represented by SEQ ID NO: 763 rather than with any other group and/or comprises motifs 40 to 42 and/or has nuclease activity and/or has at least 20% sequence identity to SEQ ID NO: 763.

[0391] Concerning YiAP2 polypeptides, preferably, the amino acid sequence encoded by the variant nucleic acid obtained by gene shuffling comprises at least two AP2 domains and at least one of motifs 43 to 48 as described above.

[0392] Furthermore, nucleic acid variants may also be obtained by site-directed mutagenesis. Several methods are available to achieve site-directed mutagenesis, the most common being PCR based methods (Current Protocols in Molecular Biology. Wiley Eds.).

[0393] Nucleic acids encoding FSM1-like polypeptides may be derived from any natural or artificial source. The nucleic acid may be modified from its native form in composition and/or genomic environment through deliberate human manipulation. Preferably the FSM1-like polypeptide-encoding nucleic acid is from a plant, further preferably from a dicotyledonous plant, more preferably from the family Solanaceae, most preferably the nucleic acid is from Solanum lycopersicum.

[0394] Nucleic acids encoding PIF3-like polypeptides may be derived from any natural or artificial source. The nucleic acid may be modified from its native form in composition and/or genomic environment through deliberate human manipulation. Preferably the PIF3-like polypeptide-encoding nucleic acid is from a plant, further preferably from a monocotyledonous plant, more preferably from the family Poaceae, most preferably the nucleic acid is from Oryza sativa.

[0395] Nucleic acids encoding UROD polypeptides may be derived from any natural or artificial source. The nucleic acid may be modified from its native form in composition and/or genomic environment through deliberate human manipulation. Preferably the UROD polypeptide-encoding nucleic acid is from a plant, further preferably from the family Salicaceae, most preferably the nucleic acid is from the genus Populus, most preferably from the species P. trichocarpa.

[0396] Nucleic acids encoding AS-MTT polypeptides may be derived from any natural or artificial source. The nucleic acid may be modified from its native form in composition and/or genomic environment through deliberate human manipulation. Preferably the AS-MTT polypeptide-encoding nucleic acid is from a plant, further preferably from a dicotyledonous plant, more preferably from the genus Populus, most preferably the nucleic acid is from Populus trichocarpa.

[0397] Nucleic acids encoding EXO-1 polypeptides may be derived from any natural or artificial source. The nucleic acid may be modified from its native form in composition and/or genomic environment through deliberate human manipulation. Preferably the EXO-1 polypeptide-encoding nucleic acid is from a plant, further preferably from a dicotyledonous plant, more preferably from the family Salicaceae, most preferably the nucleic acid is from Populus trichocarpa.

[0398] Nucleic acids encoding YiAP2 polypeptides may be derived from any natural or artificial source. The nucleic acid may be modified from its native form in composition and/or genomic environment through deliberate human manipulation. Preferably the YiAP2 polypeptide-encoding nucleic acid is from a plant, further preferably from a dicotyledonous plant, more preferably from the leguminous family, most preferably the nucleic acid is from Medicago truncatula.

[0399] Performance of the methods of the invention gives plants having enhanced yield-related traits. In particular performance of the methods of the invention gives plants having increased early vigour and/or increased yield, especially increased seed yield relative to control plants. The terms “yield” and “seed yield” are described in more detail in the “definitions” section herein.

[0400] Reference herein to enhanced yield-related traits is taken to mean an increase early vigour and/or in biomass (weight) of one or more parts of a plant, which may include aboveground (harvestable) parts and/or (harvestable) parts below ground. In particular, such harvestable parts are vegetative parts of the plant, but seeds are also included in said harvestable parts. Performance of the methods of the invention results in plants having increased biomass and seed yield relative to the plant biomass and seed yield of control plants.

[0401] The present invention provides a method for increasing yield-related traits, especially seed yield of plants and/or biomass (harvestable parts below ground), relative to control plants, which method comprises modulating expression in a plant of a nucleic acid encoding a FSM1-like polypeptide as defined herein.

[0402] The present invention also provides a method for increasing yield-related traits, especially early vigour and/or seed yield of plants, relative to control plants, which method comprises modulating expression in a plant of a nucleic acid encoding a PIF3-like polypeptide as defined herein.

[0403] The present invention also provides a method for increasing yield, especially seed yield of plants, relative to control plants, which method comprises modulating expression in a plant of a nucleic acid encoding a UROD polypeptide as defined herein.

[0404] The present invention also provides a method for increasing (yield-related traits—yield), especially seed yield of plants, relative to control plants, which method comprises modulating expression in a plant of a nucleic acid encoding an AS-MTT polypeptide as defined herein.

[0405] The present invention also provides a method for increasing yield-related traits, relative to control plants, which method comprises modulating expression in a plant of a nucleic acid encoding an EXO-1 polypeptide as defined herein.

[0406] The present invention also provides a method for enhancing yield-related traits, especially seed yield of plants, relative to control plants, which method comprises modulating expression in a plant of a nucleic acid encoding a YiAP2 polypeptide as defined herein.

[0407] Since the transgenic plants according to the present invention have increased yield related traits, it is likely that these plants exhibit an increased growth rate (during at least part of their life cycle), relative to the growth rate of control plants at a corresponding stage in their life cycle.

[0408] According to a preferred feature of the present invention, performance of the methods of the invention gives plants having an increased growth rate relative to control plants. Therefore, according to the present invention, there is provided a method for increasing the growth rate of plants, which method comprises modulating expression in a plant of a nucleic acid encoding a FSM1-like polypeptide, or a PIF3 polypeptide, or a UROD polypeptide, or an AS-MTT polypeptide, or an EXO-1 polypeptide, or a YiAP2 polypeptide, as defined herein.

[0409] Performance of the methods of the invention gives plants grown under non-stress conditions or under mild drought conditions increased yield relative to control plants grown under comparable conditions. Therefore, according to the present invention, there is provided a method for increasing yield in plants grown under non-stress conditions or under mild drought conditions, which method comprises modulating expression in a plant of a nucleic acid encoding a FSM1-like polypeptide, or a PIF3 polypeptide, or a UROD polypeptide, or an AS-MTT polypeptide, or an EXO-1 polypeptide, or a YiAP2 polypeptide.

[0410] In alternative, performance of the methods of the invention gives plants grown under drought-stress conditions or under mild drought conditions increased yield relative to control plants grown under comparable conditions. Therefore, according to the present invention, there is provided a method for increasing yield in plants grown under drought-stress conditions or under mild drought conditions, which method comprises modulating expression in a plant of a nucleic acid encoding an EXO-1 polypeptide.

[0411] Performance of the methods of the invention gives plants grown under conditions of nutrient deficiency, particularly under conditions of nitrogen deficiency, increased yield relative to control plants grown under comparable conditions. Therefore, according to the present invention, there is provided a method for increasing yield in plants grown under conditions of nutrient deficiency, which method comprises modulating expression in a plant of a nucleic acid encoding a FSM1-like polypeptide, or a PIF3 polypeptide, or a UROD polypeptide, or an AS-MTT polypeptide, or an EXO-1 polypeptide, or a YiAP2 polypeptide.

[0412] Performance of the methods of the invention gives plants grown under conditions of salt stress, increased yield relative to control plants grown under comparable conditions. Therefore, according to the present invention, there is provided a method for increasing yield in plants grown under conditions of salt stress, which method comprises modulating expression in a plant of a nucleic acid encoding a FSM1-like polypeptide, or a PIF3 polypeptide, or a UROD polypeptide, or an AS-MTT polypeptide, or an EXO-1 polypeptide, or a YiAP2 polypeptide.

[0413] The invention also provides genetic constructs and vectors to facilitate introduction and/or expression in plants of nucleic acids encoding FSM1-like polypeptides, or PIF3-like polypeptides, or UROD polypeptides, or AS-MTT polypeptides, or EXO-1 polypeptides, or YiAP2 polypeptides. The gene constructs may be inserted into vectors, which may be commercially available, suitable for transforming into plants and suitable for expression of the gene of interest in the transformed cells. The invention also provides use of a gene construct as defined herein in the methods of the invention.

[0414] More specifically, the present invention provides a construct comprising:
[0415] (a) a nucleic acid encoding a FSM1-like polypeptide, or a PIF3 polypeptide, or a UROD polypeptide, or an AS-MTT polypeptide, or an EXO-1 polypeptide, or a YiAP2 polypeptide, as defined above;
[0416] (b) one or more control sequences capable of driving expression of the nucleic acid sequence of (a); and optionally
[0417] (c) a transcription termination sequence.

[0418] Preferably, the nucleic acid encoding a FSM1-like polypeptide, or a PIF3 polypeptide, or a UROD polypeptide, or an AS-MTT polypeptide, or an EXO-1 polypeptide, or a YiAP2 polypeptide, is as defined above. The term “control sequence” and “termination sequence” are as defined herein.

[0419] Plants are transformed with a vector comprising any of the nucleic acids described above. The skilled artisan is well aware of the genetic elements that must be present on the vector in order to successfully transform, select and propagate host cells containing the sequence of interest. The sequence of interest is operably linked to one or more control sequences (at least to a promoter).

[0420] Advantageously, any type of promoter, whether natural or synthetic, may be used to drive expression of the nucleic acid sequence, but preferably the promoter is of plant origin. A constitutive promoter is particularly useful in the methods. Preferably the constitutive promoter is a ubiquitous constitutive promoter of medium strength. See the “Definitions” section herein for definitions of the various promoter types.

[0421] Concerning FSM1-like polypeptides, it should be clear that the applicability of the present invention is not restricted to the FSM1-like polypeptide-encoding nucleic acid represented by SEQ ID NO: 1, nor is the applicability of the invention restricted to expression of a FSM1-like polypeptide-encoding nucleic acid when driven by a constitutive promoter.

[0422] Preferably, the medium strength constitutive promoter is derived from a plant, such as a GOS2 promoter, more preferably it is the GOS2 promoter of rice. Furthermore preferably the constitutive promoter is represented by a nucleic acid sequence substantially similar to SEQ ID NO: 289, most preferably the constitutive promoter is as represented by SEQ ID NO: 289. See the “Definitions” section herein for further examples of constitutive promoters.

[0423] Optionally, one or more terminator sequences may be used in the construct introduced into a plant. Preferably, the construct comprises an expression cassette comprising a GOS2 promoter, substantially similar to SEQ ID NO: 289, and the nucleic acid encoding the FSM1-like polypeptide.

[0424] Concerning PIF3-like polypeptides, it should be clear that the applicability of the present invention is not restricted to the PIF3-like polypeptide-encoding nucleic acid represented by SEQ ID NO: 292, nor is the applicability of the invention restricted to expression of a PIF3-like polypeptide-encoding nucleic acid when driven by a constitutive promoter.

[0425] The constitutive promoter is preferably a medium strength promoter, more preferably selected from a plant, such as a GOS2 promoter, most preferably the promoter is the GOS2 promoter from rice. Further preferably the constitutive promoter is represented by a nucleic acid sequence substantially similar to SEQ ID NO: 366, most preferably the constitutive promoter is as represented by SEQ ID NO: 366. See the “Definitions” section herein for further examples of constitutive promoters.

[0426] Optionally, one or more terminator sequences may be used in the construct introduced into a plant. Preferably, the construct comprises an expression cassette comprising a GOS2 promoter, substantially similar to SEQ ID NO: 366, and the nucleic acid encoding the PIF3-like polypeptide.

[0427] Concerning UROD polypeptides, it should be clear that the applicability of the present invention is not restricted to the UROD polypeptide-encoding nucleic acid represented by SEQ ID NO: 367, nor is the applicability of the invention restricted to expression of a UROD polypeptide-encoding nucleic acid when driven by a constitutive promoter.

[0428] The constitutive promoter is preferably a medium strength promoter, more preferably selected from a plant derived promoter, such as a GOS2 promoter, more preferably is the promoter GOS2 promoter from rice. Further preferably the constitutive promoter is represented by a nucleic acid sequence substantially similar to SEQ ID NO: 533, most preferably the constitutive promoter is as represented by SEQ ID NO: 533. See the “Definitions” section herein for further examples of constitutive promoters.

[0429] Optionally, one or more terminator sequences may be used in the construct introduced into a plant. Preferably, the construct comprises an expression cassette comprising a GOS2 promoter, substantially similar to SEQ ID NO: 533, and the nucleic acid encoding the UROD polypeptide.

[0430] Concerning AS-MTT polypeptides, it should be clear that the applicability of the present invention is not restricted to the AS-MTT polypeptide-encoding nucleic acid represented by SEQ ID NO: 536, nor is the applicability of the invention restricted to expression of an AS-MTT polypeptide-encoding nucleic acid when driven by a constitutive promoter.

[0431] The constitutive promoter is preferably a medium strength promoter, more preferably selected from a plant derived promoter, such as a GOS2 promoter, more preferably is the promoter GOS2 promoter from rice. Further preferably the constitutive promoter is represented by a nucleic acid sequence substantially similar to SEQ ID NO: 659, most preferably the constitutive promoter is as represented by SEQ ID NO: 659. See the “Definitions” section herein for further examples of constitutive promoters.

[0432] Concerning EXO-1 polypeptides, it should be clear that the applicability of the present invention is not restricted to the EXO-1 polypeptide-encoding nucleic acid represented by SEQ ID NO: 762, nor is the applicability of the invention restricted to expression of an EXO-1 polypeptide-encoding nucleic acid when driven by a constitutive promoter.

[0433] The constitutive promoter is preferably a medium strength promoter, more preferably selected from a plant derived promoter, such as a GOS2 promoter, more preferably is the promoter GOS2 promoter from rice. Further preferably the constitutive promoter is represented by a nucleic acid sequence substantially similar to SEQ ID NO: 831, most preferably the constitutive promoter is as represented by SEQ ID NO: 831. See the “Definitions” section herein for further examples of constitutive promoters.

[0434] According to another preferred feature of the invention, the nucleic acid encoding an EXO-1 polypeptide is operably linked to a tissue-specific promoter, more preferably a shoot-specific promoter. The shoot-specific promoter is preferably beta expansin promoter (WO 2004/070039), more preferably the beta expansin EXPB9 promoter from rice. Further preferably the EXPB9 promoter is represented by a nucleic acid sequence substantially similar to SEQ ID NO: 832, most preferably the promoter is as represented by SEQ ID NO: 832. Examples of other shoot-specific promoters which may also be used to perform the methods of the invention are shown in Table 2b in the “Definitions” section above.

[0435] Optionally, one or more terminator sequences may be used in the construct introduced into a plant. Preferably, the construct comprises an expression cassette comprising a GOS2 or EXPB9 promoter, substantially similar to SEQ ID NO: 831 or SEQ ID NO: 832, and the nucleic acid encoding the EXO-1 polypeptide.

[0436] Concerning YiAP2 polypeptides, it should be clear that the applicability of the present invention is not restricted to the YiAP2 polypeptide-encoding nucleic acid represented by SEQ ID NO: 835, nor is the applicability of the invention restricted to expression of a YiAP2 polypeptide-encoding nucleic acid when driven by a constitutive promoter.

[0437] The constitutive promoter is preferably a medium strength promoter, more preferably selected from a plant derived promoter, such as a GOS2 promoter, more preferably is the promoter GOS2 promoter from rice. Further preferably the constitutive promoter is represented by a nucleic acid sequence substantially similar to SEQ ID NO: 889, most preferably the constitutive promoter is as represented by SEQ ID NO: 889. See the “Definitions” section herein for further examples of constitutive promoters.

[0438] According to a preferred feature of the invention, the modulated expression is increased expression. Methods for increasing expression of nucleic acids or genes, or gene products, are well documented in the art and examples are provided in the definitions section.

[0439] As mentioned above, a preferred method for modulating expression of a nucleic acid encoding a FSM1-like polypeptide, or a PIF3 polypeptide, or a UROD polypeptide, or an AS-MTT polypeptide, or an EXO-1 polypeptide, or a YiAP2 polypeptide, is by introducing and expressing in a plant a nucleic acid encoding a FSM1-like polypeptide, or a PIF3 polypeptide, or a UROD polypeptide, or an AS-MTT polypeptide, or an EXO-1 polypeptide, or a YiAP2 polypeptide; however the effects of performing the method, i.e. enhancing yield-related traits may also be achieved using other well known techniques, including but not limited to T-DNA activation tagging, TILLING, homologous recombination. A description of these techniques is provided in the definitions section.

[0440] The invention also provides a method for the production of transgenic plants having enhanced yield-related traits relative to control plants, comprising introduction and expression in a plant of any nucleic acid encoding a FSM1-like polypeptide, or a PIF3 polypeptide, or a UROD polypeptide, or an AS-MTT polypeptide, or an EXO-1 polypeptide, or a YiAP2 polypeptide, as defined hereinabove.

[0441] More specifically, the present invention provides a method for the production of transgenic plants having enhanced yield-related traits, particularly increased yield (seed yield and/or biomass of below ground plant parts), which method comprises:
[0442] (i) introducing and expressing in a plant or plant cell a nucleic acid encoding a FSM1-like polypeptide, or a PIF3 polypeptide, or a UROD polypeptide, or an AS-MTT polypeptide, or an EXO-1 polypeptide, or a YiAP2 polypeptide; and
[0443] (ii) cultivating the plant cell under conditions promoting plant growth and development.

[0444] The nucleic acid of (i) may be any of the nucleic acids capable of encoding a a FSM1-like polypeptide, or a PIF3 polypeptide, or a UROD polypeptide, or an AS-MTT polypeptide, or an EXO-1 polypeptide, or a YiAP2 polypeptide, as defined herein.

[0445] The nucleic acid may be introduced directly into a plant cell or into the plant itself (including introduction into a tissue, organ or any other part of a plant). According to a preferred feature of the present invention, the nucleic acid is preferably introduced into a plant by transformation. The term “transformation” is described in more detail in the “definitions” section herein.

[0446] The present invention clearly extends to any plant cell or plant produced by any of the methods described herein, and to all plant parts and propagules thereof. The present invention encompasses plants or parts thereof (including seeds) obtainable by the methods according to the present invention. The plants or parts thereof comprise a nucleic acid transgene encoding a FSM1-like polypeptide, or a PIF3 polypeptide, or a UROD polypeptide, or an AS-MTT polypeptide, or an EXO-1 polypeptide, or a YiAP2 polypeptide, as defined above. The present invention extends further to encompass the progeny of a primary transformed or transfected cell, tissue, organ or whole plant that has been produced by any of the aforementioned methods, the only requirement being that progeny exhibit the same genotypic and/or phenotypic characteristic(s) as those produced by the parent in the methods according to the invention.

[0447] The invention also includes host cells containing an isolated nucleic acid encoding a FSM1-like polypeptide, or a PIF3 polypeptide, or a UROD polypeptide, or an AS-MTT polypeptide, or an EXO-1 polypeptide, or a YiAP2 polypeptide, as defined hereinabove. Preferred host cells according to the invention are plant cells. Host plants for the nucleic acids or the vector used in the method according to the invention, the expression cassette or construct or vector are, in principle, advantageously all plants, which are capable of synthesizing the polypeptides used in the inventive method.

[0448] The methods of the invention are advantageously applicable to any plant. Plants that are particularly useful in the methods of the invention include all plants which belong to the superfamily Viridiplantae, in particular monocotyledonous and dicotyledonous plants including fodder or forage legumes, ornamental plants, food crops, trees or shrubs. According to a preferred embodiment of the present invention, the plant is a crop plant. Examples of crop plants include soybean, sunflower, canola, alfalfa, rapeseed, sugar beet, linseed, cotton, tomato, potato and tobacco. Further preferably, the plant is a monocotyledonous plant. Examples of monocotyledonous plants include sugarcane. More preferably the plant is a cereal. Examples of cereals include rice, maize, wheat, barley, millet, rye, triticale, sorghum, emmer, spelt, secale, einkorn, teff, milo and oats.

[0449] The invention also extends to harvestable parts of a plant such as, but not limited to seeds, leaves, fruits, flowers, stems, roots, rhizomes, tubers and bulbs, which harvestable parts comprise a recombinant nucleic acid encoding a FSM1-like polypeptide. The invention furthermore relates to products derived, preferably directly derived, from a harvestable part of such a plant, such as dry pellets or powders, oil, fat and fatty acids, starch or proteins.

[0450] The present invention also encompasses use of nucleic acids encoding FSM1-like polypeptides as described herein and use of these FSM1-like polypeptides, or PIF3-like polypeptides, or UROD polypeptides, or AS-MTT polypeptides, or EXO-1 polypeptides, or YiAP2 polypeptides, in enhancing any of the aforementioned yield-related traits in plants. For example, nucleic acids encoding a FSM1-like polypeptide, or a PIF3 polypeptide, or a UROD polypeptide, or an AS-MTT polypeptide, or an EXO-1 polypeptide, or a YiAP2 polypeptide, described herein, or the FSM1-like polypeptides, or PIF3-like polypeptides, or UROD polypeptides, or AS-MTT polypeptides, or EXO-1 polypeptides, or YiAP2 polypeptides, themselves, may find use in breeding programmes in which a DNA marker is identified which may be genetically linked to a gene encoding a FSM1-like polypeptide, or a PIF3 polypeptide, or a UROD polypeptide, or an AS-MTT polypeptide, or an EXO-1 polypeptide, or a YiAP2 polypeptide. The nucleic acids/genes, or the FSM1-like polypeptides, or PIF3-like polypeptides, or UROD polypeptides, or AS-MTT polypeptides, or EXO-1 polypeptides, or YiAP2 polypeptides, themselves may be used to define a molecular marker. This DNA or protein marker may then be used in breeding programmes to select plants having enhanced yield-related traits as defined hereinabove in the methods of the invention. Furthermore, allelic variants of a nucleic acid/gene encoding a FSM1-like polypeptide, or a PIF3 polypeptide, or a UROD polypeptide, or an AS-MTT polypeptide, or an EXO-1 polypeptide, or a YiAP2 polypeptide, may find use in marker-assisted breeding programmes. Nucleic acids encoding a FSM1-like polypeptide, or a PIF3 polypeptide, or a UROD polypeptide, or an AS-MTT polypeptide, or an EXO-1 polypeptide, or a YiAP2 polypeptide, may also be used as probes for genetically and physically mapping the genes that they are a part of, and as markers for traits linked to those genes. Such information may be useful in plant breeding in order to develop lines with desired phenotypes.

### Items

### 1. FSM1-Like (Fruit Sant/Myb) Polypeptides

[0451] 1. A method for enhancing yield-related traits in plants relative to control plants, comprising modulating expression in a plant of a nucleic acid encoding a FSM1-like polypeptide, wherein said FSM1-like polypeptide comprises a SANT domain (SMART accession SM0017).
[0452] 2. Method according to item 1, wherein said FSM1-like polypeptide comprises one or more of the following motifs:

(i) Motif 1:

(SEQ ID NO: 283)

W[TS][PA]K[QE]NK[LA]FE[RK]ALAVYD[KR][DE]TPDRW[HSQ]
N[VI]A[RK]A,
(ii) Motif 2:

(SEQ ID NO: 284)

GGK[ST][AV][ED]EV[KR]RHYE[IL]L,
(iii) Motif 3:

(SEQ ID NO: 285)

D[VL][KF][HF]I[ED][SN]G[RM]VPFP[NK]Y

[0453] 3. Method according to item 1 or 2, wherein said modulated expression is effected by introducing and expressing in a plant a nucleic acid encoding a FSM1-like polypeptide.
[0454] 4. Method according to any one of items 1 to 3, wherein said nucleic acid encoding a FSM1-like polypeptide encodes any one of the proteins listed in Table A1 or is a portion of such a nucleic acid, or a nucleic acid capable of hybridising with such a nucleic acid.
[0455] 5. Method according to any one of items 1 to 4, wherein said nucleic acid sequence encodes an orthologue or paralogue of any of the proteins given in Table A1.
[0456] 6. Method according to any preceding item, wherein said enhanced yield-related traits comprise increased yield, preferably increased biomass and/or increased seed yield relative to control plants.
[0457] 7. Method according to any one of items 1 to 6, wherein said enhanced yield-related traits are obtained under non-stress conditions.
[0458] 8. Method according to any one of items 3 to 7, wherein said nucleic acid is operably linked to a constitutive promoter, preferably to a GOS2 promoter, most preferably to a GOS2 promoter from rice.
[0459] 9. Method according to any one of items 1 to 8, wherein said nucleic acid encoding a FSM1-like polypeptide is of plant origin, preferably from a dicotyledonous plant, further preferably from the family Solanaceae, more preferably from the genus Lycopersicon, most preferably from Solanum lycopersicum.
[0460] 10. Plant or part thereof, including seeds, obtainable by a method according to any one of items 1 to 9, wherein said plant or part thereof comprises a recombinant nucleic acid encoding a FSM1-like polypeptide.
[0461] 11. Construct comprising:
   [0462] (i) nucleic acid encoding a FSM1-like polypeptide as defined in items 1 or 2;
   [0463] (ii) one or more control sequences capable of driving expression of the nucleic acid sequence of (a); and optionally
   [0464] (iii) a transcription termination sequence.
[0465] 12. Construct according to item 11, wherein one of said control sequences is a constitutive promoter, preferably a GOS2 promoter, most preferably a GOS2 promoter from rice.
[0466] 13. Use of a construct according to item 11 or 12 in a method for making plants having increased yield, particularly increased biomass and/or increased seed yield relative to control plants.
[0467] 14. Plant, plant part or plant cell transformed with a construct according to item 11 or 12.
[0468] 15. Method for the production of a transgenic plant having increased yield, particularly increased biomass and/or increased seed yield relative to control plants, comprising:
   [0469] (i) introducing and expressing in a plant a nucleic acid encoding a FSM1-like polypeptide as defined in item 1 or 2; and
   [0470] (ii) cultivating the plant cell under conditions promoting plant growth and development.
[0471] 16. Transgenic plant having increased yield, particularly increased biomass and/or increased seed yield, relative to control plants, resulting from modulated expression of a nucleic acid encoding a FSM1-like polypeptide as defined in item 1 or 2, or a transgenic plant cell derived from said transgenic plant.
[0472] 17. Transgenic plant according to item 10, 14 or 16, or a transgenic plant cell derived thereof, wherein said plant is a crop plant or a monocot or a cereal, such as rice, maize, wheat, barley, millet, rye, triticale, sorghum emmer, spelt, secale, einkorn, teff, milo and oats.
[0473] 18. Harvestable parts of a plant according to item 17, wherein said harvestable parts are preferably shoot biomass and/or seeds.
[0474] 19. Products derived from a plant according to item 17 and/or from harvestable parts of a plant according to item 18.
[0475] 20. Use of a nucleic acid encoding a FSM1-like polypeptide in increasing yield, particularly in increasing seed yield and/or shoot biomass in plants, relative to control plants.

### 2. PIF3-Like (Phytochrome Interacting Factor 3) Polypeptides

[0476] 1. A method for enhancing yield-related traits in plants relative to control plants, comprising modulating expression in a plant of a nucleic acid encoding a PIF3-like polypeptide, wherein said PIF3-like polypeptide comprises a Helix-Loop-Helix domain (PF00010).
[0477] 2. Method according to item 1, wherein said PIF3-like polypeptide comprises one or more of motifs 7 to 12 (SEQ ID NO: 358 to SEQ ID NO: 363).
[0478] 3. Method according to item 1 or 2, wherein said modulated expression is effected by introducing and expressing in a plant a nucleic acid encoding a PIF3-like polypeptide.
[0479] 4. Method according to any one of items 1 to 3, wherein said nucleic acid encoding a PIF3-like polypeptide encodes any one of the proteins listed in Table A2 or is a portion of such a nucleic acid, or a nucleic acid capable of hybridising with such a nucleic acid.
[0480] 5. Method according to any one of items 1 to 4, wherein said nucleic acid sequence encodes an orthologue or paralogue of any of the proteins given in Table A2.
[0481] 6. Method according to any preceding item, wherein said enhanced yield-related traits comprise increased early vigour and/or increased seed yield relative to control plants.
[0482] 7. Method according to any one of items 1 to 6, wherein said enhanced yield-related traits are obtained under conditions of drought stress.
[0483] 8. Method according to any one of items 3 to 7, wherein said nucleic acid is operably linked to a constitutive promoter, preferably to a GOS2 promoter, most preferably to a GOS2 promoter from rice.
[0484] 9. Method according to any one of items 1 to 8, wherein said nucleic acid encoding a PIF3-like polypeptide is of plant origin, preferably from a dicotyledonous plant, further preferably from the family Poaceae, more preferably from the genus Oryza, most preferably from Oryza sativa.
[0485] 10. Plant or part thereof, including seeds, obtainable by a method according to any one of items 1 to 10, wherein said plant or part thereof comprises a recombinant nucleic acid encoding a PIF3-like polypeptide.
[0486] 11. Construct comprising:
   [0487] (i) nucleic acid encoding a PIF3-like polypeptide as defined in items 1 or 2;
   [0488] (ii) one or more control sequences capable of driving expression of the nucleic acid sequence of (a); and optionally
   [0489] (iii) a transcription termination sequence.
[0490] 12. Construct according to item 12, wherein one of said control sequences is a constitutive promoter, preferably a GOS2 promoter, most preferably a GOS2 promoter from rice.
[0491] 13. Use of a construct according to item 12 or 13 in a method for making plants having increased yield, particularly increased biomass and/or increased seed yield relative to control plants.
[0492] 14. Plant, plant part or plant cell transformed with a construct according to item 12 or 13.
[0493] 15. Method for the production of a transgenic plant having increased yield, particularly increased biomass and/or increased seed yield relative to control plants, comprising:
   [0494] (i) introducing and expressing in a plant a nucleic acid encoding a PIF3-like polypeptide as defined in item 1 or 2; and
   [0495] (ii) cultivating the plant cell under conditions promoting plant growth and development.
[0496] 16. Transgenic plant having increased yield, particularly increased biomass and/or increased seed yield, relative to control plants, resulting from modulated expression of a nucleic acid encoding a PIF3-like polypeptide as defined in item 1 or 2, or a transgenic plant cell derived from said transgenic plant.
[0497] 17. Transgenic plant according to item 11, 15 or 17, or a transgenic plant cell derived thereof, wherein said plant is a crop plant or a monocot or a cereal, such as rice, maize, wheat, barley, millet, rye, triticale, sorghum emmer, spelt, secale, einkorn, teff, milo and oats.
[0498] 18. Harvestable parts of a plant according to item 18, wherein said harvestable parts are preferably shoot biomass and/or seeds.
[0499] 19. Products derived from a plant according to item 18 and/or from harvestable parts of a plant according to item 19.
[0500] 20. Use of a nucleic acid encoding a PIF3-like polypeptide in increasing yield, particularly in increasing seed yield and/or shoot biomass in plants, relative to control plants.
[0501] 21. An isolated nucleic acid molecule comprising any one of the following features selected from:
   [0502] (i) a nucleic acid represented by SEQ ID NO: 356;
   [0503] (ii) the complement of a nucleic acid represented by SEQ ID NO: 356;
   [0504] (iii) a nucleic acid encoding a PIF3-like polypeptide having in increasing order of preference at least 50%, 51%, 52%, 53%, 54%, 55%, 56%, 57%, 58%, 59%, 60%, 61%, 62%, 63%, 64%, 65%, 66%, 67%, 68%, 69%, 70%, 71%, 72%, 73%, 74%, 75%, 76%, 77%, 78%, 79%, 80%, 81%, 82%, 83%, 84%, 85%, 86%, 87%, 88%, 89%, 90%, 91%, 92%, 93%, 94%, 95%, 96%, 97%, 98%, or 99% sequence identity to the amino acid sequence represented by SEQ ID NO: 357, and additionally or alternatively comprising one or more motifs having in increasing order of preference less than 5, less than 4, less than 3, less than 2, or less than 1 substitutions (sequence mismatches) compared to any one or more of the motifs given in SEQ ID NO: 358 to SEQ ID NO: 363, and further preferably conferring enhanced yield-related traits relative to control plants.
   [0505] (iv) a nucleic acid molecule which hybridizes with a nucleic acid molecule of (i) to (iii) under high stringency hybridization conditions and preferably confers enhanced yield-related traits relative to control plants.
[0506] 22. An isolated polypeptide selected from:
   [0507] (i) an amino acid sequence represented by SEQ ID NO: 357;
   [0508] (ii) an amino acid sequence having, in increasing order of preference, at least 50%, 51%, 52%, 53%, 54%, 55%, 56%, 57%, 58%, 59%, 60%, 61%, 62%, 63%, 64%, 65%, 66%, 67%, 68%, 69%, 70%, 71%, 72%, 73%, 74%, 75%, 76%, 77%, 78%, 79%, 80%, 81%, 82%, 83%, 84%, 85%, 86%, 87%, 88%, 89%, 90%, 91%, 92%, 93%, 94%, 95%, 96%, 97%, 98%, or 99% sequence identity to the amino acid sequence represented by SEQ ID NO: 357, and additionally or alternatively comprising one or more motifs having in increasing order of preference less than 5, less than 4, less than 3, less than 2, or less than 1 substitutions (sequence mismatches) compared to any one or more of the motifs given in SEQ ID NO: 358 to SEQ ID NO: 363, and further preferably conferring enhanced yield-related traits relative to control plants;
   [0509] (iii) derivatives of any of the amino acid sequences given in (i) or (ii) above.

### 3. UROD (Uroporphyrinogen III Decarboxylase) Polypeptide

[0510] 1. A method for enhancing yield-related traits in plants relative to control plants, comprising modulating expression in a plant of a nucleic acid encoding a polypeptide having uroporphyrinogen III decarboxylase activity (UROD).
[0511] 2. Method according to item 1, wherein said UROD polypeptide comprises any one or more of Motifs 13 to 30.
[0512] 3. Method according to item 1 or 2, wherein said modulated expression is effected by introducing and expressing in a plant a nucleic acid encoding a UROD polypeptide.
[0513] 4. Method according to any one of items 1 to 3, wherein said nucleic acid encoding a UROD polypeptide encodes any one of the proteins listed in Table A3 or is a portion of such a nucleic acid, or a nucleic acid capable of hybridising with such a nucleic acid.
[0514] 5. Method according to any one of items 1 to 4, wherein said nucleic acid sequence encodes an orthologue or paralogue of any of the proteins given in Table A3.
[0515] 6. Method according to any preceding item, wherein said enhanced yield-related traits comprise increased seed yield relative to control plants.
[0516] 7. Method according to any one of items 1 to 6, wherein said enhanced yield-related traits are obtained under non-stress conditions.
[0517] 8. Method according to any one of items 1 to 6, wherein said enhanced yield-related traits are obtained under conditions of drought stress.
[0518] 9. Method according to any one of items 3 to 8, wherein said nucleic acid is operably linked to a constitutive promoter, preferably to a GOS2 promoter, most preferably to a GOS2 promoter from rice.
[0519] 10. Method according to any one of items 1 to 9, wherein said nucleic acid encoding a UROD polypeptide is of plant origin, family Salicaceae, more preferably from the genus Populus, most preferably from Populus trichocarpa.
[0520] 11. Plant or part thereof, including seeds, obtainable by a method according to any one of items 1 to 10, wherein said plant or part thereof comprises a recombinant nucleic acid encoding a UROD polypeptide.
[0521] 12. Construct comprising:
   [0522] (i) nucleic acid encoding a UROD polypeptide as defined in items 1 or 2;
   [0523] (ii) one or more control sequences capable of driving expression of the nucleic acid sequence of (a); and optionally
   [0524] (iii) a transcription termination sequence.
[0525] 13. Construct according to item 12, wherein one of said control sequences is a constitutive promoter, preferably a GOS2 promoter, most preferably a GOS2 promoter from rice.
[0526] 14. Use of a construct according to item 12 or 13 in a method for making plants having increased yield, particularly increased seed yield relative to control plants.
[0527] 15. Plant, plant part or plant cell transformed with a construct according to item 12 or 13.
[0528] 16. Method for the production of a transgenic plant having increased yield, particularly increased biomass and/or increased seed yield relative to control plants, comprising:
   [0529] (i) introducing and expressing in a plant a nucleic acid encoding a UROD polypeptide as defined in item 1 or 2; and
   [0530] (ii) cultivating the plant cell under conditions promoting plant growth and development.
[0531] 17. Transgenic plant having increased yield, particularly seed yield, relative to control plants, resulting from modulated expression of a nucleic acid encoding a UROD polypeptide as defined in item 1 or 2, or a transgenic plant cell derived from said transgenic plant.
[0532] 18. Transgenic plant according to item 11, 15 or 17, or a transgenic plant cell derived thereof, wherein said plant is a crop plant or a monocot or a cereal, such as rice, maize, wheat, barley, millet, rye, triticale, sorghum emmer, spelt, secale, einkorn, teff, milo and oats.
[0533] 19. Harvestable parts of a plant according to item 18, wherein said harvestable parts are preferably shoot biomass and/or seeds.
[0534] 20. Products derived from a plant according to item 18 and/or from harvestable parts of a plant according to item 19.
[0535] 21. Use of a nucleic acid encoding a UROD polypeptide in increasing yield, particularly in increasing seed yield and/or shoot biomass in plants, relative to control plants.

### 4. AS-MTT (Abiotic Stress Membrane Tethered Transcription Factor) Polypeptides

[0536] 1. A method for enhancing yield-related traits in plants relative to control plants, comprising modulating expression in a plant of a nucleic acid encoding an AS-MTT polypeptide, wherein said AS-MTT polypeptide comprises a DUF1664 domain.
[0537] 2. Method according to item 1, wherein said AS-MTT polypeptide comprises one or more of the following motifs:

(i) Motif 31:

(SEQ ID NO: 648)

G[WL][SK][FL]SD[LV]M[YF][VA]T[KR]R[NS][ML][AS][ND]
AV[SA][SN][VL][TS]K[QH]L[ED][QN]VS[ESD][AS]LAA
[TA]K[RK]HL[TS]QR,
(ii) Motif 32:

(SEQ ID NO: 649)

AA[AT][VL]G[AV][VLM]GY[GC]YMWWK,
(iii) Motif 33:

(SEQ ID NO: 650)

GAG[LY]TG[ST][IV][LV][LA][KR][NE]G[KR]L

[0538] 3. Method according to item 1 or 2, wherein said modulated expression is effected by introducing and expressing in a plant a nucleic acid encoding an AS-MTT polypeptide.
[0539] 4. Method according to any one of items 1 to 3, wherein said nucleic acid encoding an AS-MTT polypeptide encodes any one of the proteins listed in Table A4 or is a portion of such a nucleic acid, or a nucleic acid capable of hybridising with such a nucleic acid.
[0540] 5. Method according to any one of items 1 to 4, wherein said nucleic acid sequence encodes an orthologue or paralogue of any of the proteins given in Table A4.
[0541] 6. Method according to any preceding item, wherein said enhanced yield-related traits comprise increased increased seed yield relative to control plants.
[0542] 7. Method according to any one of items 1 to 6, wherein said enhanced yield-related traits are obtained under non-stress conditions.
[0543] 8. Method according to any one of items 1 to 6, wherein said enhanced yield-related traits are obtained under conditions of drought stress, salt stress or nitrogen deficiency.
[0544] 9. Method according to any one of items 3 to 8, wherein said nucleic acid is operably linked to a constitutive promoter, preferably to a GOS2 promoter, most preferably to a GOS2 promoter from rice.
[0545] 10. Method according to any one of items 1 to 9, wherein said nucleic acid encoding an AS-MTT polypeptide is of plant origin, preferably from a dicotyledonous plant, further preferably from the genus Populus, most preferably from Populus trichocarpa.
[0546] 11. Plant or part thereof, including seeds, obtainable by a method according to any one of items 1 to 10, wherein said plant or part thereof comprises a recombinant nucleic acid encoding an AS-MTT polypeptide.
[0547] 12. Construct comprising:
   [0548] (i) nucleic acid encoding an AS-MTT polypeptide as defined in items 1 or 2;
   [0549] (ii) one or more control sequences capable of driving expression of the nucleic acid sequence of (a); and optionally
   [0550] (iii) a transcription termination sequence.
[0551] 13. Construct according to item 12, wherein one of said control sequences is a constitutive promoter, preferably a GOS2 promoter, most preferably a GOS2 promoter from rice.
[0552] 14. Use of a construct according to item 12 or 13 in a method for making plants having increased yield, particularly increased biomass and/or increased seed yield relative to control plants.
[0553] 15. Plant, plant part or plant cell transformed with a construct according to item 12 or 13.
[0554] 16. Method for the production of a transgenic plant having increased yield, particularly increased biomass and/or increased seed yield relative to control plants, comprising:
   [0555] (i) introducing and expressing in a plant a nucleic acid encoding an AS-MTT polypeptide as defined in item 1 or 2; and
   [0556] (ii) cultivating the plant cell under conditions promoting plant growth and development.
[0557] 17. Transgenic plant having increased yield, particularly increased biomass and/or increased seed yield, relative to control plants, resulting from modulated expression of a nucleic acid encoding an AS-MTT polypeptide as defined in item 1 or 2, or a transgenic plant cell derived from said transgenic plant.
[0558] 18. Transgenic plant according to item 11, 15 or 17, or a transgenic plant cell derived thereof, wherein said plant is a crop plant or a monocot or a cereal, such as rice, maize, wheat, barley, millet, rye, triticale, sorghum emmer, spelt, secale, einkorn, teff, milo and oats.
[0559] 19. Harvestable parts of a plant according to item 18, wherein said harvestable parts are preferably shoot biomass and/or seeds.
[0560] 20. Products derived from a plant according to item 18 and/or from harvestable parts of a plant according to item 19.
[0561] 21. Use of a nucleic acid encoding an AS-MTT polypeptide in increasing yield, particularly in increasing seed yield and/or shoot biomass in plants, relative to control plants.

### 5. EXO-1 Polypeptide

[0562] 1. A method for enhancing yield-related traits in plants relative to control plants, comprising modulating expression in a plant of a nucleic acid encoding an EXO-1 polypeptide, wherein said EXO-1 polypeptide comprises at least one of the following domains: XPG_N with accession number PF00752, XPG_1 with accession number PF00867 or EXONUCLEASE 1 domain with accession number PTHR11081:SF8.
[0563] 2. Method, according to item 1, wherein said EXO-1 polypeptide comprises one or more of the following motifs:

Motif 40:

(SEQ ID NO: 664)

G[QKC][RT]VA[VI]D[TA]YSWLH[KR][GA]A[YL]SC[SA]RELC
[KEL]GLPT,
Motif 41:

(SEQ ID NO: 665)

Y[CF]M[HK]RVN[LM]L[RL]H[YH][GK][VI]KP[IV][LV]
VFDGGRLPMK[AS][DE][QTE]ENKR[AR]R[SK]RKENL[EA]RA
[KR]E[HL][ELW],
Motif 42:

(SEQ ID NO: 666)

V[DQA]A[VI]ITEDSDL[IL][AP][FY]GC[PK]R[IV][IF]FK
[ML]D[KR][FYN]GQG

[0564] 3. Method, according to item 1 or 2, wherein said modulated expression is effected by introducing and expressing in a plant a nucleic acid encoding an EXO-1 polypeptide.
[0565] 4. Method, according to any one of items 1 to 3, wherein said nucleic acid encoding an EXO-1 polypeptide encodes any one of the proteins listed in Table A5 or is a portion of such a nucleic acid, or a nucleic acid capable of hybridising with such a nucleic acid.
[0566] 5. Method, according to any one of items 1 to 4, wherein said nucleic acid sequence encodes an orthologue or paralogue of any of the proteins given in Table A5.
[0567] 6. Method, according to any preceding item, wherein said enhanced yield-related traits comprise increased (yield—early vigour), preferably increased biomass and/or increased seed yield relative to control plants.
[0568] 7. Method, according to any one of items 1 to 6, wherein said enhanced yield-related traits are obtained under non-stress conditions.
[0569] 8. Method, according to any one of items 1 to 6, wherein said enhanced yield-related traits are obtained under conditions of drought stress, salt stress or nitrogen deficiency.
[0570] 9. Method, according to any one of items 3 to 8, wherein said nucleic acid is operably linked to a constitutive promoter, preferably to a GOS2 promoter, most preferably to a GOS2 promoter from rice.
[0571] 10. Method, according to any one of items 3 to 8, wherein said nucleic acid is operably linked to a shoot-specific promoter, preferably to a beta expansin promoter, most preferably to an EXPB9 promoter from rice
[0572] 11. Method, according to any one of items 1 to 10, wherein said nucleic acid encoding an EXO-1 polypeptide is of plant origin, preferably from a dicotyledonous plant, further preferably from the family Salicaceae, more preferably from the genus Populus, most preferably from Populus trichocarpa.
[0573] 12. Plant or part thereof, including seeds, obtainable by a method according to any one of items 1 to 11, wherein said plant or part thereof comprises a recombinant nucleic acid encoding an EXO-1 polypeptide.
[0574] 13. Construct comprising:
   [0575] (i) nucleic acid encoding an EXO-1 polypeptide as defined in items 1 or 2;
   [0576] (ii) one or more control sequences capable of driving expression of the nucleic acid sequence of (a); and optionally
   [0577] (iii) a transcription termination sequence.
[0578] 14. Construct according to item 13, wherein one of said control sequences is a constitutive promoter, preferably a GOS2 promoter, most preferably a GOS2 promoter from rice.
[0579] 15. Construct, according to item 13, wherein one of said control sequences is a shoot-specific promoter, preferably a beta expansin promoter, most preferably an EXPB9 promoter from rice
[0580] 16. Use of a construct, according to any of the items 13 to 15, in a method for making plants having increased yield, particularly increased biomass and/or increased seed yield relative to control plants.
[0581] 17. Plant, plant part or plant cell transformed with a construct according to any of the items 13 to 15.
[0582] 18. Method for the production of a transgenic plant having increased yield, particularly increased biomass and/or increased seed yield relative to control plants, comprising:
   [0583] (i) introducing and expressing in a plant a nucleic acid encoding an EXO-1 polypeptide as defined in item 1 or 2; and
   [0584] (ii) cultivating the plant cell under conditions promoting plant growth and development.
[0585] 19. Transgenic plant having increased yield, particularly increased biomass and/or increased seed yield, relative to control plants, resulting from modulated expression of a nucleic acid encoding an EXO-1 polypeptide as defined in item 1 or 2, or a transgenic plant cell derived from said transgenic plant.
[0586] 20. Transgenic plant, according to item 12, 17 or 19, or a transgenic plant cell derived thereof, wherein said plant is a crop plant or a monocot or a cereal, such as rice, maize, wheat, barley, millet, rye, triticale, sorghum emmer, spelt, secale, einkorn, teff, milo and oats.
[0587] 21. Harvestable parts of a plant according to item 20, wherein said harvestable parts are preferably shoot biomass and/or seeds.
[0588] 22. Products derived from a plant, according to item 20 and/or from harvestable parts of a plant according to item 21.
[0589] 23. Use of a nucleic acid encoding an EXO-1 polypeptide in increasing yield, particularly in increasing seed yield and/or shoot biomass in plants, relative to control plants.

### 6. YiAP2 Polypeptides

[0590] 1. A method for enhancing yield-related traits in plants relative to control plants, comprising modulating expression in a plant of a nucleic acid encoding a YiAP2 polypeptide or a portion thereof.
[0591] 2. Method according to item 1, wherein said YiAP2 polypeptide comprises at least two AP2 domains and one or more motifs having at least 50%, 51%, 52%, 53%, 54%, 55%, 56%, 57%, 58%, 59%, 60%, 61%, 62%, 63%, 64%, 65%, 66%, 67%, 68%, 69%, 70%, 71%, 72%, 73%, 74%, 75%, 76%, 77%, 78%, 79%, 80%, 81%, 82%, 83%, 84%, 85%, 86%, 87%, 88%, 89%, 90%, 91%, 92%, 93%, 94%, 95%, 96%, 97%, 98%, 99% or 100% sequence identity to any one of the following motifs:
   [0592] (i) Motif 43 as represented by SEQ ID NO: 890;
   [0593] (ii) Motif 44 as represented by SEQ ID NO: 891;
   [0594] (iii) Motif 45 as represented by SEQ ID NO: 892;
   [0595] (iv) Motif 46 as represented by SEQ ID NO: 893;
   [0596] (v) Motif 47 as represented by SEQ ID NO: 894;
   [0597] (vi) Motif 48 as represented by SEQ ID NO: 895.
[0598] 3. Method according to item 1 or 2, wherein said modulated expression is effected by introducing and expressing in a plant a nucleic acid encoding a YiAP2 polypeptide.
[0599] 4. Method according to any one of items 1 to 3, wherein said nucleic acid encoding a YiAP2 polypeptide encodes any one of the proteins listed in Table A6 or is a portion of such a nucleic acid, or a nucleic acid capable of hybridising with such a nucleic acid.
[0600] 5. Method according to any one of items 1 to 4, wherein said nucleic acid sequence encodes an orthologue or paralogue of any of the proteins given in Table A6.
[0601] 6. Method according to any preceding item, wherein said enhanced yield-related traits comprise increased yield preferably increased seed yield relative to control plants.
[0602] 7. Method according to any one of items 1 to 6, wherein said enhanced yield-related traits are obtained under non-stress conditions.
[0603] 8. Method according to any one of items 1 to 6, wherein said enhanced yield-related traits are obtained under conditions of drought stress, salt stress or nitrogen deficiency.
[0604] 9. Method according to any one of items 3 to 8, wherein said nucleic acid is operably linked to a constitutive promoter, preferably to a GOS2 promoter, most preferably to a GOS2 promoter from rice.
[0605] 10. Method according to any one of items 1 to 9, wherein said nucleic acid encoding a YiAP2 polypeptide is of plant origin, preferably from a dicotyledonous plant, more preferably from the genus Medicago, most preferably from Medicago truncatula.
[0606] 11. Plant or part thereof, including seeds, obtainable by a method according to any one of items 1 to 10, wherein said plant or part thereof comprises a recombinant nucleic acid encoding a YiAP2 polypeptide.
[0607] 12. Construct comprising:
   [0608] (i) nucleic acid encoding a YiAP2 polypeptide as defined in items 1 or 2;
   [0609] (ii) one or more control sequences capable of driving expression of the nucleic acid sequence of (a); and optionally
   [0610] (iii) a transcription termination sequence.
[0611] 13. Construct according to item 12, wherein one of said control sequences is a constitutive promoter, preferably a GOS2 promoter, most preferably a GOS2 promoter from rice.
[0612] 14. Use of a construct according to item 12 or 13 in a method for making plants having increased yield, particularly increased biomass and/or increased seed yield relative to control plants.
[0613] 15. Plant, plant part or plant cell transformed with a construct according to item 12 or 13.
[0614] 16. Method for the production of a transgenic plant having increased yield, particularly increased biomass and/or increased seed yield relative to control plants, comprising:
   [0615] (i) introducing and expressing in a plant a nucleic acid encoding a YiAP2 polypeptide as defined in item 1 or 2; and
   [0616] (ii) cultivating the plant cell under conditions promoting plant growth and development.
[0617] 17. Transgenic plant having increased yield, particularly increased biomass and/or increased seed yield, relative to control plants, resulting from modulated expression of a nucleic acid encoding a YiAP2 polypeptide as defined in item 1 or 2, or a transgenic plant cell derived from said transgenic plant.
[0618] 18. Transgenic plant according to item 11, 15 or 17, or a transgenic plant cell derived thereof, wherein said plant is a crop plant or a monocot or a cereal, such as rice, maize, wheat, barley, millet, rye, triticale, sorghum emmer, spelt, secale, einkorn, teff, milo and oats.
[0619] 19. Harvestable parts of a plant according to item 18, wherein said harvestable parts are preferably shoot biomass and/or seeds.
[0620] 20. Products derived from a plant according to item 18 and/or from harvestable parts of a plant according to item 19.
[0621] 21. Use of a nucleic acid encoding a YiAP2 polypeptide in increasing yield, particularly in increasing seed yield and/or shoot biomass in plants, relative to control plants.

### DESCRIPTION OF FIGURES

[0622] The present invention will now be described with reference to the following figures in which:

[0623] FIG. 1 represents the domain structure of SEQ ID NO: 2 with the conserved motifs underlined and numbered. The MYB/SANT domain (PF00249) is indicated in italics and stretches from Ser11 to Leu60.

[0624] FIG. 2 represents a multiple alignment of various FSM1-like polypeptides. The asterisks indicate identical amino acids among the various protein sequences, colons represent highly conserved amino acid substitutions, and the dots represent less conserved amino acid substitution; on other positions there is no sequence conservation. These alignments can be used for defining further motifs, when using conserved amino acids. M.guttatus_DV207881: SEQ ID NO: 122; A.majus_TA4522_4151: SEQ ID NO: 6; V.vinifera_EE072107: SEQ ID NO: 252; G.hirsutum_TA31277_3635: SEQ ID NO: 58; G.hirsutum_DW503354: SEQ ID NO: 54; H.exilis_EE652824: SEQ ID NO: 96; E.gunnii_CT985658: SEQ ID NO: 40; P.trichocarpa_557252: SEQ ID NO: 184; P.euphratica_AJ768574: SEQ ID NO: 170; P.trichocarpa_sc_IV.1184: SEQ ID NO: 188; L.serriola_DW122081: SEQ ID NO: 110; L.virosa_TA3253_75947: SEQ ID NO: 112; L.sativa_TA7946_4236: SEQ ID NO: 108; C.intybus_EH706852: SEQ ID NO: 30; M.domestica_DR994824: SEQ ID NO: 116; S.lycopersicum_TA46686: SEQ ID NO: 2; N.benthamiana_EH366122: SEQ ID NO: 136; T.salsuginea_DN773374: SEQ ID NO: 244; B.napus_BN06MC20309: SEQ ID NO: 18; A.thaliana_At2g21650: SEQ ID NO: 12; A.thaliana_At4g39250: SEQ ID NO: 16; G.max_Glyma06g46590.1: SEQ ID NO: 84; G.max_Glyma04g16390.1: SEQ ID NO: 80; M.truncatula_AC135566: SEQ ID NO: 124; G.max_Glyma02g18210.1: SEQ ID NO: 74; M.truncatula_AC157502: SEQ ID NO: 126; G.max_Glyma03g28050.1: SEQ ID NO: 78; and G.hirsutum_DR461014: SEQ ID NO: 48.

[0625] FIG. 3 represents the binary vector used for increased expression in Oryza sativa of a FSM1-like-encoding nucleic acid under the control of a rice GOS2 promoter (pGOS2).

[0626] FIG. 4 represents the consensus sequence of the SANT domain as present in the SMART database. The different symbols in the motifs are clarified in the table where for each class of amino acids the respective residues are given with the one-letter code. 624028/1-50: SEQ ID NO: 898.

[0627] FIG. 5 represents the domain structure of SEQ ID NO: 293 with the HLH domain (PF00010) in bold and the conserved motifs underlined and numbered.

[0628] FIG. 6 represents a multiple alignment of various PIF3-like polypeptides. The asterisks indicate identical amino acids among the various protein sequences, colons represent highly conserved amino acid substitutions, and the dots represent less conserved amino acid substitution; on other positions there is no sequence conservation. These alignments can be used for defining further motifs, when using conserved amino acids. AT2G43010_1: SEQ ID NO: 297; AT3G59060_1: SEQ ID NO: 299; Glyma08g41620_1: SEQ ID NO: 305; Glyma18g14530_1: SEQ ID NO: 313; Glyma02g45150_1: SEQ ID NO: 301; Pt_scaff V_1141_1: SEQ ID NO: 345; Pt_TC100024_1: SEQ ID NO: 349; SI_TC192046_1: SEQ ID NO: 351; Os03g43810_1: SEQ ID NO: 319; and Os12g41650_2: SEQ ID NO: 293.

[0629] FIG. 7 represents the binary vector used for increased expression in Oryza sativa of a PIF3-like-encoding nucleic acid under the control of a rice GOS2 promoter (pGOS2) FIG. 8 is an alignment of the polypeptide sequence of SEQ ID NO: 368 with the Arabidopsis thaliana HEME1 and 2 sequences (At3g14930 and At2g40490), and human UROD proteins using ClustalW program. SEQ ID NO: 368 shares 75% amino acid identity with the Arabidopsis HEME1 sequence and 48% amino acid identity with the Arabidopsis HEME2 sequence. The alignment shows highly conserved residues even with the human sequence. HEM E1: SEQ ID NO: 374 or 376; Poplar: SEQ ID NO: 368; HEME2: SEQ ID NO: 372; and Human_UROD: SEQ ID NO: 899.

[0630] FIG. 9 represents the binary vector used for increased expression in Oryza sativa of a UROD-encoding nucleic acid under the control of a rice GOS2 promoter (pGOS2).

[0631] FIG. 10 represents a multiple alignment of various AS-MTT polypeptides. The asterisks indicate identical amino acids among the various protein sequences, colons represent highly conserved amino acid substitutions, and the dots represent less conserved amino acid substitution; on other positions there is no sequence conservation. These alignments can be used for defining further motifs, when using conserved amino acids. P.trichocarpa_657115#1_A: SEQ ID NO: 537; P.trichocarpa_657115#1.2_A: SEQ ID NO: 539; P.trichocarpa_566293#1_A: SEQ ID NO: 559; G.hirsutum_TC83567#1_A: SEQ ID NO: 549; B.napus_TC66611#1_A: SEQ ID NO: 551; A.thaliana_AT1G27000.1#1_A: SEQ ID NO: 553; C.sinensis_TC3201#1_A: SEQ ID NO: 543; A.thaliana_AT2G02730.1#1_A: SEQ ID NO: 547; M.domestica_TC12261#1_A: SEQ ID NO: 545; M.domestica_TC9509#1_A: SEQ ID NO: 555; P.persica_TC1247#1_A: SEQ ID NO: 541; and M.truncatula_AC136286_4.4#1_A: SEQ ID NO: 557.

[0632] FIG. 11 represents the binary vector used for increased expression in Oryza sativa of an AS-MTT-encoding nucleic acid under the control of a rice GOS2 promoter (pGOS2).

[0633] FIG. 12 represents the alignment of XPG-N and XPG-I domains between EXO1 from Oryza sativa (OsEXO1) and other EXO1 proteins. The accession numbers for each protein sequence: OsEXO1 (BAD60834; SEQ ID NO: 757), AtEXO1a (At1G18090; SEQ ID NO: 737), AtEXO1b (At1g29630; SEQ ID NO: 739), HEX1 (AAC32259; SEQ ID NO: 846), MmEXO1 (NP_036142; SEQ ID NO: 900), DmEXO1 (CAA61431; SEQ ID NO: 745), ScEXO1 (NP_014676; SEQ ID NO: 769), SpEXO1 (NP_596050; SEQ ID NO: 901).

[0634] FIG. 13 represents the binary vector used for increased expression in Oryza sativa of an EXO-1-encoding nucleic acid under the control of a rice GOS2 promoter (pGOS2).

[0635] FIG. 14 represents the binary vector used for increased expression in Oryza sativa of an EXO-1-encoding nucleic acid under the control of a rice beta expansin promoter (EXPB9).

[0636] FIG. 15 represents a multiple alignment of various YiAP2 polypeptides. Highly conserved amino acids are indicated in the consensus sequences. Empty spaces in the consensus sequence represent any amino acid. These alignments can be used for defining further motifs, when using conserved amino acids. A.thaliana_AT1G16060.1#1: SEQ ID NO: 838; C.clementina_DY290073#1: SEQ ID NO: 844; C.sinensis_EY655317#1: SEQ ID NO: 852; G.max_Glyma07g02380.1#1: SEQ ID NO: 860; C.clementina_DY288437#1: SEQ ID NO: 842; C.clementina_DY301305#1: SEQ ID NO: 846; C.clementina_TC1922#1: SEQ ID NO: 848; C.clementina_TC2567#1: SEQ ID NO: 850; C.sinensis_EY726128#1: SEQ ID NO: 854; C.sinensis_TC9216#1: SEQ ID NO: 856; G.max_Glyma17g07860.1#1: SEQ ID NO: 862; M.truncatula_AC126784_13.5#1: SEQ ID NO: 864; Medtr_AP2: SEQ ID NO: 836; O.sativa_LOC_Os08g34360.1#1: SEQ ID NO: 868; O.sativa_LOC_Os09g25600.1#1: SEQ ID NO: 870; S.bicolor_Sb02g025080.1#1: SEQ ID NO: 878; Z.mays_TC386652#1: SEQ ID NO: 886; O.basilicum_TA1087_39350#1: SEQ ID NO: 866; Triphysaria_sp_TC12598#1: SEQ ID NO: 882; P.trichocarpa_800184#1: SEQ ID NO: 872; S.tuberosum_TC187592#1: SEQ ID NO: 880; Aquilegia_sp_TC20979#1: SEQ ID NO: 840; G.hirsutum_TC125414#1: SEQ ID NO: 858; V.vinifera_GSVIVT00017130001#1: SEQ ID NO: 884; R.communis_EG658396#1: SEQ ID NO: 874; R.communis_TA2948_3988#1: SEQ ID NO: 876; and Consensus: SEQ ID NO: 902.

[0637] FIG. 16 represents the binary vector used for increased expression in Oryza sativa of a YiAP2-encoding nucleic acid under the control of a rice GOS2 promoter (pGOS2).

### EXAMPLES

[0638] The present invention will now be described with reference to the following examples, which are by way of illustration alone. The following examples are not intended to completely define or otherwise limit the scope of the invention.

[0639] DNA manipulation: unless otherwise stated, recombinant DNA techniques are performed according to standard protocols described in (Sambrook (2001) Molecular Cloning: a laboratory manual, 3rd Edition Cold Spring Harbor Laboratory Press, CSH, New York) or in Volumes 1 and 2 of Ausubel et al. (1994), Current Protocols in Molecular Biology, Current Protocols. Standard materials and methods for plant molecular work are described in Plant Molecular Biology Labfax (1993) by R. D. D. Croy, published by BIOS Scientific Publications Ltd (UK) and Blackwell Scientific Publications (UK).

### Example 1

### Identification of Sequences Related to the Nucleic Acid Sequence Used in the Methods of the Invention

### 1. FSM1-Like (Fruit Sant/Myb) Polypeptides

[0640] Sequences (full length cDNA, ESTs or genomic) related to SEQ ID NO: 1 and SEQ ID NO: 2 were identified amongst those maintained in the Entrez Nucleotides database at the National Center for Biotechnology Information (NCBI) using database sequence search tools, such as the Basic Local Alignment Tool (BLAST) (Altschul et al. (1990) J. Mol. Biol. 215:403-410; and Altschul et al. (1997) Nucleic Acids Res. 25:3389-3402). The program is used to find regions of local similarity between sequences by comparing nucleic acid or polypeptide sequences to sequence databases and by calculating the statistical significance of matches. For example, the polypeptide encoded by the nucleic acid of SEQ ID NO: 1 was used for the TBLASTN algorithm, with default settings and the filter to ignore low complexity sequences set off. The output of the analysis was viewed by pairwise comparison, and ranked according to the probability score (E-value), where the score reflect the probability that a particular alignment occurs by chance (the lower the E-value, the more significant the hit). In addition to E-values, comparisons were also scored by percentage identity. Percentage identity refers to the number of identical nucleotides (or amino acids) between the two compared nucleic acid (or polypeptide) sequences over a particular length. In some instances, the default parameters may be adjusted to modify the stringency of the search. For example the E-value may be increased to show less stringent matches. This way, short nearly exact matches may be identified.

[0641] Table A1 provides a list of nucleic acid sequences related to SEQ ID NO: 1 and SEQ ID NO: 2.

TABLE A1
Examples of FSM1-like nucleic acids and polypeptides:

| | Nucleic acid | Polypeptide |
|---|---|---|
| Name | SEQ ID NO: | SEQ ID NO: |
| S.lycopersicum_TA46686_4081#1 | 1 | 2 |
| A.majus_AJ793240#1 | 3 | 4 |
| A.majus_TA4522_4151#1 | 5 | 6 |
| A.thaliana_AT1G19510.1#1 | 7 | 8 |
| A.thaliana_AT1G75250.2#1 | 9 | 10 |
| A.thaliana_AT2G21650.1#1 | 11 | 12 |
| At4g36570_I-box-binding-like_NA | 13 | 14 |
| A.thaliana_AT4G39250.1#1 | 15 | 16 |
| B.napus_ | 17 | 18 |
| BN06MC20309_46582753@20242#1 | | |
| B.napus_EE472702#1 | 19 | 20 |
| B.napus_EL589700#1 | 21 | 22 |
| B.rapa_L38243#1 | 23 | 24 |
| C.annuum_BM060888#1 | 25 | 26 |
| C.clementina_CX295458#1 | 27 | 28 |
| C.intybus_EH706852#1 | 29 | 30 |
| C.maculosa_EH726540#1 | 31 | 32 |
| C.sinensis_TA19011_2711#1 | 33 | 34 |
| E.grandis_CD669972#1 | 35 | 36 |
| E.gunnii_CT980385#1 | 37 | 38 |
| E.gunnii_CT985658#1 | 39 | 40 |
| E.tereticornis_CD668687#1 | 41 | 42 |
| F.arundinacea_DT700402#1 | 43 | 44 |
| F.vesca_EX665737#1 | 45 | 46 |
| G.hirsutum_DR461014#1 | 47 | 48 |
| G.hirsutum_DW476156#1 | 49 | 50 |
| G.hirsutum_DW497247#1 | 51 | 52 |
| G.hirsutum_DW503354#1 | 53 | 54 |
| G.hirsutum_TA26706_3635#1 | 55 | 56 |
| G.hirsutum_TA31277_3635#1 | 57 | 58 |
| G.hirsutum_TA36120_3635#1 | 59 | 60 |
| G.hirsutum_TA37973_3635#1 | 61 | 62 |
| G.hirsutum_TA43581_3635#1 | 63 | 64 |
| G.max_CA852793#1 | 65 | 66 |
| G.max_Glyma01g38250.1#1 | 67 | 68 |
| G.max_Glyma02g06230.1#1 | 69 | 70 |
| G.max_Glyma02g06240.1#1 | 71 | 72 |
| G.max_Glyma02g18210.1#1 | 73 | 74 |
| G.max_Glyma02g41670.1#1 | 75 | 76 |
| G.max_Glyma03g28050.1#1 | 77 | 78 |
| G.max_Glyma04g16390.1#1 | 79 | 80 |
| G.max_Glyma06g03490.1#1 | 81 | 82 |
| G.max_Glyma06g46590.1#1 | 83 | 84 |
| G.max_Glyma12g04680.1#1 | 85 | 86 |
| G.max_Glyma14g08090.3#1 | 87 | 88 |
| G.max_Glyma16g25250.1#1 | 89 | 90 |
| G.max_Glyma18g04120.1#1 | 91 | 92 |
| H.argophyllus_EE611072#1 | 93 | 94 |
| H.exilis_EE652824#1 | 95 | 96 |
| H.vulgare_BQ762901#1 | 97 | 98 |
| H.vulgare_CK125210#1 | 99 | 100 |
| I.batatas_E E882249#1 | 101 | 102 |
| I.nil_CJ754125#1 | 103 | 104 |
| L.perennis_DW074785#1 | 105 | 106 |
| L.sativa_TA7946_4236#1 | 107 | 108 |
| L.serriola_DW122081#1 | 109 | 110 |
| L.virosa_TA3253_75947#1 | 111 | 112 |
| M.acuminata_ES435134#1 | 113 | 114 |
| M.domestica_DR994824#1 | 115 | 116 |
| M.domestica_TA45680_3750#1 | 117 | 118 |
| M.esculenta_CK645030#1 | 119 | 120 |
| M.guttatus_DV207881#1 | 121 | 122 |
| M.truncatula_AC135566_10.5#1 | 123 | 124 |
| M.truncatula_AC157502_5.5#1 | 125 | 126 |
| M.truncatula_AC162787_11.4#1 | 127 | 128 |
| M.truncatula_AC162787_14.4#1 | 129 | 130 |
| M.truncatula_CT033768_12.4#1 | 131 | 132 |
| M.truncatula_CX518743#1 | 133 | 134 |
| N.benthamiana_EH366122#1 | 135 | 136 |
| O.minuta_TA1082_63629#1 | 137 | 138 |
| O.sativa_LOC_Os01g44370.1#1 | 139 | 140 |
| O.sativa_LOC_Os01g44390.1#1 | 141 | 142 |
| O.sativa_LOC_Os01g47370.1#1 | 143 | 144 |
| O.sativa_LOC_Os02g47744.1#1 | 145 | 146 |
| O.sativa_LOC_Os05g49240.1#1 | 147 | 148 |
| O.sativa_LOC_Os05g50350.1#1 | 149 | 150 |
| O.sativa_LOC_Os06g28630.1#1 | 151 | 152 |
| O.sativa_LOC_Os07g26150.1#1 | 153 | 154 |
| O.sativa_LOC_Os12g33950.1#1 | 155 | 156 |
| O.sativa_Os05g0579600#1 | 157 | 158 |
| P.americana_CO997831#1 | 159 | 160 |
| P.americana_DT578382#1 | 161 | 162 |
| P.coccineus_CA897021#1 | 163 | 164 |
| P.euphratica_AJ768009#1 | 165 | 166 |
| P.euphratica_AJ768184#1 | 167 | 168 |
| P.euphratica_AJ768574#1 | 169 | 170 |
| P.glauca_DR559298#1 | 171 | 172 |
| P.pinaster_BX682614#1 | 173 | 174 |
| P.taeda_TA26731_3352#1 | 175 | 176 |
| P.tremula_BU823356#1 | 177 | 178 |
| P.tremula_TA8294_113636#1 | 179 | 180 |
| P.trichocarpa_553339#1 | 181 | 182 |
| P.trichocarpa_557252#1 | 183 | 184 |
| P.trichocarpa_scaff_57.171#1 | 185 | 186 |
| P.trichocarpa_scaff_IV.1184#1 | 187 | 188 |
| P.trichocarpa_scaff_IX.506#1 | 189 | 190 |
| P.trichocarpa_scaff_V.1348#1 | 191 | 192 |
| P.trichocarpa_TA23239_3694#1 | 193 | 194 |
| S.bicolor_Sb01g040910.1#1 | 195 | 196 |
| S.bicolor_Sb03g028950.1#1 | 197 | 198 |
| S.bicolor_Sb03g028960.1#1 | 199 | 200 |
| S.bicolor_Sb03g030330.1#1 | 201 | 202 |
| S.bicolor_Sb04g030510.1#1 | 203 | 204 |
| S.bicolor_Sb09g028790.1#1 | 205 | 206 |
| S.bicolor_Sb09g029560.1#1 | 207 | 208 |
| S.henryi_TA107_13258#1 | 209 | 210 |
| S.indicum_BU668323#1 | 211 | 212 |
| S.officinarum_CA111191#1 | 213 | 214 |
| S.officinarum_CA283940#1 | 215 | 216 |
| S.officinarum_TA43900_4547#1 | 217 | 218 |
| S.officinarum_TA47846_4547#1 | 219 | 220 |
| S.tuberosum_BI433702#1 | 221 | 222 |
| S.tuberosum_CV500497#1 | 223 | 224 |
| S.tuberosum_CV504810#1 | 225 | 226 |
| T.aestivum_BE427243#1 | 227 | 228 |
| T.aestivum_BM259034#1 | 229 | 230 |
| T.aestivum_CA623533#1 | 231 | 232 |
| T.aestivum_CV775992#1 | 233 | 234 |
| T.aestivum_TA110455_4565#1 | 235 | 236 |
| T.aestivum_TA95415_4565#1 | 237 | 238 |
| T.erecta_ | 239 | 240 |
| SIN_31b-CS_SCR20-B14.b1-@5804#1 | | |
| T.pratense_BB920325#1 | 241 | 242 |
| T.salsuginea_DN773374#1 | 243 | 244 |
| V.vinifera_CA812415#1 | 245 | 246 |
| V.vinifera_CB345061#1 | 247 | 248 |
| V.vinifera_CB972578#1 | 249 | 250 |
| V.vinifera_EE072107#1 | 251 | 252 |
| V.vinifera_GSVIVT00014602001#1 | 253 | 254 |
| V.vinifera_GSVIVT00028247001#1 | 255 | 256 |
| V.vinifera_GSVIVT00036374001#1 | 257 | 258 |
| Z.mays_c58977309gm030403@3901#1 | 259 | 260 |
| Z.mays_c68506706gm030403@11442#1 | 261 | 262 |
| Z.mays_DR787399#1 | 263 | 264 |
| Z.mays_s58275634gm030403@34722#1 | 265 | 266 |
| Z.mays_TA203683_4577#1 | 267 | 268 |
| Z.mays_TA206461_4577#1 | 269 | 270 |
| Z.mays_TA208256_4577#1 | 271 | 272 |
| Z.mays_TA210755_4577#1 | 273 | 274 |
| Z.mays_TA219702_4577#1 | 275 | 276 |
| Z.mays_ | 277 | 278 |
| ZM07MSbpsHQ_57388861.r01@38768#1 | | |
| Z.officinale_DY348802#1 | 279 | 280 |
| Z.officinale_DY369792#1 | 281 | 282 |

[0642] Sequences have been tentatively assembled and publicly disclosed by research institutions, such as The Institute for Genomic Research (TIGR; beginning with TA). The Eukaryotic Gene Orthologs (EGO) database may be used to identify such related sequences, either by keyword search or by using the BLAST algorithm with the nucleic acid sequence or polypeptide sequence of interest. Special nucleic acid sequence databases have been created for particular organisms, such as by the Joint Genome Institute. Furthermore, access to proprietary databases, has allowed the identification of novel nucleic acid and polypeptide sequences.

### 2. PIF3-Like (Phytochrome Interacting Factor 3) Polypeptides

[0643] Sequences (full length cDNA, ESTs or genomic) related to SEQ ID NO: 292 and SEQ ID NO: 293 were identified amongst those maintained in the Entrez Nucleotides database at the National Center for Biotechnology Information (NCBI) using database sequence search tools, such as the Basic Local Alignment Tool (BLAST) (Altschul et al. (1990) J. Mol. Biol. 215:403-410; and Altschul et al. (1997) Nucleic Acids Res. 25:3389-3402). The program is used to find regions of local similarity between sequences by comparing nucleic acid or polypeptide sequences to sequence databases and by calculating the statistical significance of matches. For example, the polypeptide encoded by the nucleic acid of SEQ ID NO: 292 was used for the TBLASTN algorithm, with default settings and the filter to ignore low complexity sequences set off. The output of the analysis was viewed by pairwise comparison, and ranked according to the probability score (E-value), where the score reflect the probability that a particular alignment occurs by chance (the lower the E-value, the more significant the hit). In addition to E-values, comparisons were also scored by percentage identity. Percentage identity refers to the number of identical nucleotides (or amino acids) between the two compared nucleic acid (or polypeptide) sequences over a particular length. In some instances, the default parameters may be adjusted to modify the stringency of the search. For example the E-value may be increased to show less stringent matches. This way, short nearly exact matches may be identified.

[0644] Table A2 provides a list of nucleic acid sequences related to SEQ ID NO: 292 and SEQ ID NO: 293.

TABLE A2
Examples of PIF3-like nucleic acids and polypeptides:

| | Nucleic acid | Polypeptide |
|---|---|---|
| Name | SEQ ID NO: | SEQ ID NO: |
| O_sativa_LOC_Os12g41650_2 | 292 | 293 |
| (SEQ ID NO: 292) | | |
| A_thaliana_AT2G20180_2_1 | 294 | 295 |
| A_thaliana_AT2G43010_1_1 | 296 | 297 |
| A_thaliana_AT3G59060_1_1 | 298 | 299 |
| G_max_Glyma02g45150_1_1 | 300 | 301 |
| G_max_Glyma03g32740_1_1 | 302 | 303 |
| G_max_Glyma08g41620_1_1 | 304 | 305 |
| G_max_Glyma10g04890_1_1 | 306 | 307 |
| G_max_Glyma10g28290_1_1 | 308 | 309 |
| G_max_Glyma13g 19250_1_1 | 310 | 311 |
| G_max_Glyma18g 14530_1_1 | 312 | 313 |
| M_truncatula_AC161749_19_5_1 | 314 | 315 |
| M_truncatula_TC130203_1 | 316 | 317 |
| O_sativa_LOC_Os03g43810_1_1 | 318 | 319 |
| O_sativa_LOC_Os03g56950_2 | 320 | 321 |
| O_sativa_LOC_Os03g56950_5_1 | 322 | 323 |
| O_sativa_LOC_Os03g56950_6_1 | 324 | 325 |
| O_sativa_LOC_Os03g56950_7_1 | 326 | 327 |
| O_sativa_LOC_Os07g05010_1_1 | 328 | 329 |
| A_thaliana_AT1G09530_1_1 | 330 | 331 |
| O_sativa_Os03g0782500_1 | 332 | 333 |
| O_sativa_Os07g0143200_1 | 334 | 335 |
| P_trichocarpa_581594_1 | 336 | 337 |
| P_trichocarpa_756351_1 | 338 | 339 |
| P_trichocarpa_scaff_131_21_1 | 340 | 341 |
| P_trichocarpa_scaff_II_2575_1 | 342 | 343 |
| P_trichocarpa_scaff_V_1141_1 | 344 | 345 |
| P_trichocarpa_scaff_XIII_13_1 | 346 | 347 |
| P_trichocarpa_TC100024_1 | 348 | 349 |
| S_lycopersicum_TC192046_1 | 350 | 351 |
| Oryza Sativa TMCDS_14571 | 352 | 353 |
| Populus trichocarpa TMCDS_30166 | 354 | 355 |
| Z_mays_ | 356 | 357 |
| ZM07MC05422_62035389_5410_1 | | |

[0645] Sequences have been tentatively assembled and publicly disclosed by research institutions, such as The Institute for Genomic Research (TIGR; beginning with TA). The Eukaryotic Gene Orthologs (EGO) database may be used to identify such related sequences, either by keyword search or by using the BLAST algorithm with the nucleic acid sequence or polypeptide sequence of interest. Special nucleic acid sequence databases have been created for particular organisms, such as by the Joint Genome Institute. Furthermore, access to proprietary databases, has allowed the identification of novel nucleic acid and polypeptide sequences.

### 3. UROD (Uroporphyrinogen III Decarboxylase) Polypeptide

[0646] Sequences (full length cDNA, ESTs or genomic) related to SEQ ID NO: 367 and SEQ ID NO: 368 were identified amongst those maintained in the Entrez Nucleotides database at the National Center for Biotechnology Information (NCBI) using database sequence search tools, such as the Basic Local Alignment Tool (BLAST) (Altschul et al. (1990) J. Mol. Biol. 215:403-410; and Altschul et al. (1997) Nucleic Acids Res. 25:3389-3402). The program is used to find regions of local similarity between sequences by comparing nucleic acid or polypeptide sequences to sequence databases and by calculating the statistical significance of matches. For example, the polypeptide encoded by the nucleic acid of SEQ ID NO: 367 was used for the TBLASTN algorithm, with default settings and the filter to ignore low complexity sequences set off. The output of the analysis was viewed by pairwise comparison, and ranked according to the probability score (E-value), where the score reflect the probability that a particular alignment occurs by chance (the lower the E-value, the more significant the hit). In addition to E-values, comparisons were also scored by percentage identity. Percentage identity refers to the number of identical nucleotides (or amino acids) between the two compared nucleic acid (or polypeptide) sequences over a particular length. In some instances, the default parameters may be adjusted to modify the stringency of the search. For example the E-value may be increased to show less stringent matches. This way, short nearly exact matches may be identified.

[0647] Table A3 provides a list of nucleic acid sequences related to SEQ ID NO: 367 and SEQ ID NO: 368.

TABLE A3
Examples of UROD nucleic acids and polypeptides:

| | Nucleic acid | Polypeptide |
|---|---|---|
| Name | SEQ ID NO: | SEQ ID NO: |
| P.trichocarpa | 367 | 368 |
| A.anophagefferens_30614#1 | 369 | 370 |
| A.thaliana_AT2G40490.1#1 | 371 | 372 |
| A.thaliana_AT3G14930.1#1 | 373 | 374 |
| A.thaliana_AT3G14930.2#1 | 375 | 376 |
| Aquilegia_sp_TC24226#1 | 377 | 378 |
| Aquilegia_sp_TC24505#1 | 379 | 380 |
| B.napus_TC68105#1 | 381 | 382 |
| B.napus_TC76241#1 | 383 | 384 |
| B.napus_TC77092#1 | 385 | 386 |
| C.reinhardtii_132194#1 | 387 | 388 |
| C.reinhardtii_186446#1 | 389 | 390 |
| C.reinhardtii_195818#1 | 391 | 392 |
| C.sinensis_TC316#1 | 393 | 394 |
| C.vulgaris_25726#1 | 395 | 396 |
| C.vulgaris_61627#1 | 397 | 398 |
| C.vulgaris_69032#1 | 399 | 400 |
| Chlorella_32323#1 | 401 | 402 |
| Chlorella_48884#1 | 403 | 404 |
| E.esula_TC8568#1 | 405 | 406 |
| E.huxleyi_361296#1 | 407 | 408 |
| E.huxleyi_465530#1 | 409 | 410 |
| G.hirsutum_TC101219#1 | 411 | 412 |
| G.max_Glyma11g35910.1#1 | 413 | 414 |
| G.max_Glyma12g35880.2#1 | 415 | 416 |
| G.max_Glyma13g34500.2#1 | 417 | 418 |
| G.max_Glyma18g02490.1#1 | 419 | 420 |
| H.vulgare_TC175532#1 | 421 | 422 |
| L.serriola_TC1532#1 | 423 | 424 |
| L.virosa_TA4736_75947#1 | 425 | 426 |
| M.domestica_TC16580#1 | 427 | 428 |
| M.truncatula_AC119409_9.4#1 | 429 | 430 |
| M.truncatula_AC149472_12.4#1 | 431 | 432 |
| N.tabacum_TC14277#1 | 433 | 434 |
| O.basilicum_TA2234_39350#1 | 435 | 436 |
| O.glaberrima_Og013395.01#1 | 437 | 438 |
| O.lucimarinus_17656#1 | 439 | 440 |
| O.lucimarinus_18446#1 | 441 | 442 |
| O.lucimarinus_28976#1 | 443 | 444 |
| O.RCC809_32990#1 | 445 | 446 |
| O.RCC809_53774#1 | 447 | 448 |
| O.sativa_LOC_Os01g43390.1#1 | 449 | 450 |
| O.sativa_LOC_Os03g21900.1#1 | 451 | 452 |
| O.taurii_13162#1 | 453 | 454 |
| O.taurii_14772#1 | 455 | 456 |
| O.taurii_9156#1 | 457 | 458 |
| P.patens_112020#1 | 459 | 460 |
| P.patens_112870#1 | 461 | 462 |
| P.patens_188035#1 | 463 | 464 |
| P.persica_TC4822#1 | 465 | 466 |
| P.taeda_TA15428_3352#1 | 467 | 468 |
| P.tremuloides_826111#1 | 469 | 470 |
| P.tricornutum_19188#1 | 471 | 472 |
| P.tricornutum_20757#1 | 473 | 474 |
| R.communis_TA2993_3988#1 | 475 | 476 |
| S.bicolor_Sb01g036030.1#1 | 477 | 478 |
| S.bicolor_Sb03g028330.1#1 | 479 | 480 |
| S.lycopersicum_TC195523#1 | 481 | 482 |
| S.lycopersicum_TC209939#1 | 483 | 484 |
| S.moellendorffii_231982#1 | 485 | 486 |
| S.moellendorffii_438672#1 | 487 | 488 |
| S.officinarum_TC104808#1 | 489 | 490 |
| S.tuberosum_TC166562#1 | 491 | 492 |
| T.aestiyum_TC347283#1 | 493 | 494 |
| T.pseudonana_3974#1 | 495 | 496 |
| Triphysaria_sp_TC2645#1 | 497 | 498 |
| V.carteri_103889#1 | 499 | 500 |
| V.carteri_74033#1 | 501 | 502 |
| V.carteri_83541#1 | 503 | 504 |
| V.vinifera_GSVIVT00027816001#1 | 505 | 506 |
| Z.mays_EB164247#1 | 507 | 508 |
| Z.mays_TC386418#1 | 509 | 510 |
| Z.mays_TC407629#1 | 511 | 512 |
| Z.mays_ZM07MC20070_BFb0115I19@20019#1 | 513 | 514 |

[0648] Sequences have been tentatively assembled and publicly disclosed by research institutions, such as The Institute for Genomic Research (TIGR; beginning with TA). The Eukaryotic Gene Orthologs (EGO) database may be used to identify such related sequences, either by keyword search or by using the BLAST algorithm with the nucleic acid sequence or polypeptide sequence of interest. Special nucleic acid sequence databases have been created for particular organisms, such as by the Joint Genome Institute. Furthermore, access to proprietary databases, has allowed the identification of novel nucleic acid and polypeptide sequences.

### 4. AS-MTT (Abiotic Stress Membrane Tethered Transcription Factor) Polypeptides

[0649] Sequences (full length cDNA, ESTs or genomic) related SEQ ID NO: 536 and SEQ ID NO: 537 were identified amongst those maintained in the Entrez Nucleotides database at the National Center for Biotechnology Information (NCBI) using database sequence search tools, such as the Basic Local Alignment Tool (BLAST) (Altschul et al. (1990) J. Mol. Biol. 215:403-410; and Altschul et al. (1997) Nucleic Acids Res. 25:3389-3402). The program is used to find regions of local similarity between sequences by comparing nucleic acid or polypeptide sequences to sequence databases and by calculating the statistical significance of matches. For example, the polypeptide encoded by the nucleic acid of SEQ ID NO: 536 was used for the TBLASTN algorithm, with default settings and the filter to ignore low complexity sequences set off. The output of the analysis was viewed by pairwise comparison, and ranked according to the probability score (E-value), where the score reflect the probability that a particular alignment occurs by chance (the lower the E-value, the more significant the hit). In addition to E-values, comparisons were also scored by percentage identity. Percentage identity refers to the number of identical nucleotides (or amino acids) between the two compared nucleic acid (or polypeptide) sequences over a particular length. In some instances, the default parameters may be adjusted to modify the stringency of the search. For example the E-value may be increased to show less stringent matches. This way, short nearly exact matches may be identified.

[0650] Table A4 provides a list of nucleic acid sequences related to the nucleic acid sequence used in the methods of the present invention.

TABLE A4
Examples of AS-MTT nucleic acids and polypeptides:

| | Nucleic acid | Polypeptide |
|---|---|---|
| Gene name in class | SEQ ID NO: | SEQ ID NO: |
| P.trichocarpa_657115#1_A | 536 | 537 |
| P.trichocarpa_657115#1.2_A | 538 | 539 |
| P.persica_TC1247#1_A | 540 | 541 |
| C.sinensis_TC3201#1_A | 542 | 543 |
| M.domestica_TC12261#1_A | 544 | 545 |
| A.thaliana_AT2G02730.1#1_A | 546 | 547 |
| G.hirsutum_TC83567#1_A | 548 | 549 |
| B.napus_TC66611#1_A | 550 | 551 |
| A.thaliana_AT1G27000.1#1_A | 552 | 553 |
| M.domestica_TC9509#1_A | 554 | 555 |
| M.truncatula_AC136286_4.4#1_A | 556 | 557 |
| P.trichocarpa_566293#1_A | 558 | 559 |
| S.officinarum_TC86637#1_B | 560 | 561 |
| P.americana_TA1256_3435#1_B | 562 | 563 |
| C.maculosa_TA1398_215693#1_B | 564 | 565 |
| O.sativa_LOC_Os01g08990.1#1_B | 566 | 567 |
| O.sativa_LOC_Os05g08980.1#1_B | 568 | 569 |
| T.officinale_TA751_50225#1_B | 570 | 571 |
| F.arundinacea_TC6829#1_B | 572 | 573 |
| S.bicolor_Sb03g003440.1#1_B | 574 | 575 |
| I.nil_TC6724#1_B | 576 | 577 |
| S.tuberosum_TC170010#1_B | 578 | 579 |
| Aquilegia_sp_TC25212#1_B | 580 | 581 |
| V.vinifera_GSVIVT00029000001#1_B | 582 | 583 |
| H.annuus_TC32349#1_B | 584 | 585 |
| A.comosus_DT336453#1_bZIP17-like | 586 | 587 |
| Triphysaria_sp_TC1899#1_bZIP17-like | 588 | 589 |
| M.truncatula_CU024880_148.4#1_bZIP17-like | 590 | 591 |
| L.sativa_TC16705#1_bZIP17-like | 592 | 593 |
| P.taeda_TA8248_3352#1_bZIP17-like | 594 | 595 |
| H.paradoxus_TA2663_73304#1_bZIP17-like | 596 | 597 |
| E.esula_TC4805#1_bZIP17-like | 598 | 599 |
| I.nil_TC113#1_bZIP17-like | 600 | 601 |
| A.thaliana_AT1G04960.1#1_bZIP17-like | 602 | 603 |
| O.sativa_LOC_Os09g30478.1#1_bZIP17-like | 604 | 605 |
| Aquilegia_sp_TC26001#1_bZIP17-like | 606 | 607 |
| H.vulgare_TC157185#1_bZIP17-like | 608 | 609 |
| P.trichocarpa_645036#1_bZIP17-like | 610 | 611 |
| T.aestivum_TC297361#1_bZIP17-like | 612 | 613 |
| S.tuberosum_TC182348#1_bZIP17-like | 614 | 615 |
| E.esula_TC6178#1_Unk | 616 | 617 |
| L.sativa_TC18726#1_Unk | 618 | 619 |
| P.patens_136490#1_Unk | 620 | 621 |
| V.vinifera_GSVIVT00002774001#1_Unk | 622 | 623 |
| C.solstitialis_TA4216_347529#1_Unk | 624 | 625 |
| S.moellendorffii_271950#1_Unk | 626 | 627 |
| A.thaliana_AT1G24267.1#1_Unk | 628 | 629 |
| G.hirsutum_TC128629#1_Unk | 630 | 631 |
| A.thaliana_AT1G24265.2#1_Unk | 632 | 633 |
| G.max_Glyma08g29150.1#1_Unk | 634 | 635 |
| S.bicolor_Sb03g009200.1#1_Unk | 636 | 637 |
| O.sativa_LOC_Os01g02180.1#1_Unk | 638 | 639 |
| Aguilegia_sp_TC28043#1_Unk | 640 | 641 |
| S.tuberosum_TC184255#1_Unk | 642 | 643 |
| P.trichocarpa_554754#1_Unk | 644 | 645 |
| Triphysaria_sp_TC917#1_Unk | 646 | 647 |

### 5. EXO-1 Polypeptide

[0651] Sequences (full length cDNA, ESTs or genomic) related to SEQ ID NO: 762 and SEQ ID NO: 763 were identified amongst those maintained in the Entrez Nucleotides database at the National Center for Biotechnology Information (NCBI) using database sequence search tools, such as the Basic Local Alignment Tool (BLAST) (Altschul et al. (1990) J. Mol. Biol. 215:403-410; and Altschul et al. (1997) Nucleic Acids Res. 25:3389-3402). The program is used to find regions of local similarity between sequences by comparing nucleic acid or polypeptide sequences to sequence databases and by calculating the statistical significance of matches. For example, the polypeptide encoded by the nucleic acid of SEQ ID NO: 762 was used for the TBLASTN algorithm, with default settings and the filter to ignore low complexity sequences set off. The output of the analysis was viewed by pairwise comparison, and ranked according to the probability score (E-value), where the score reflect the probability that a particular alignment occurs by chance (the lower the E-value, the more significant the hit). In addition to E-values, comparisons were also scored by percentage identity. Percentage identity refers to the number of identical nucleotides (or amino acids) between the two compared nucleic acid (or polypeptide) sequences over a particular length. In some instances, the default parameters may be adjusted to modify the stringency of the search. For example the E-value may be increased to show less stringent matches. This way, short nearly exact matches may be identified.

[0652] Table AS provides a list of nucleic acid sequences related to SEQ ID NO: 762 and SEQ ID NO: 763.

TABLE A5
Examples of EXO-1 polypeptides:

| | Nucleic acid | Polypeptide |
|---|---|---|
| Name | SEQ ID NO: | SEQ ID NO: |
| A. thaliana_AT3G28030.1_I | 660 | 661 |
| D. melanogaster_mus201-PB_I | 662 | 663 |
| G. max_Glyma01g16370.1_ | 664 | 665 |
| H. sapiens_NM_000123.2_ | 666 | 667 |
| O. sativa_Os03g0205400_ | 668 | 669 |
| P. trichocarpa_scaff_XVII.231_I | 670 | 671 |
| S. bicolor_Sb01g043560.1_ | 672 | 673 |
| V. vinifera_GSVIVT00020778001_ | 674 | 675 |
| A. anophagefferens_19112_ | 676 | 677 |
| A. anophagefferens_53007_ | 678 | 679 |
| Aquilegia_sp_TC27969_ | 680 | 681 |
| Aquilegia_sp_TC29285_ | 682 | 683 |
| B. distachyon_TA2015_15368_ | 684 | 685 |
| B. napus_TC86178_ | 686 | 687 |
| C. reinhardtii_130834_ | 688 | 689 |
| C. vulgaris_45023_ | 690 | 691 |
| Chlorella_37697_ | 692 | 693 |
| D. melanogaster_Fen1-PA_ | 694 | 695 |
| G. max_Glyma10g28200.1_ | 696 | 697 |
| G. max_Glyma20g22190.2_ | 698 | 699 |
| H. sapiens_NM_004111.4_ | 700 | 701 |
| H. vulgare_TC165804_ | 702 | 703 |
| M. truncatula_AC148406_42.5_II | 704 | 705 |
| O. 1ucimarinus_42373_ | 706 | 707 |
| O. RCC809_87153_ | 708 | 709 |
| O. sativa_LOC_Os03g61820.1_II | 710 | 711 |
| O. sativa_Os05g0540100_II | 712 | 713 |
| O. taurii_28688_ | 714 | 715 |
| P. patens_207454_ | 716 | 717 |
| S. bicolor_Sb09g026950.1_ | 718 | 719 |
| S. cerevisiae_YKL113C_ | 720 | 721 |
| S. lycopersicum_TC192754_ | 722 | 723 |
| S. moellendorffii_111465_ | 724 | 725 |
| S. tuberosum_TC179198_ | 726 | 727 |
| T. aestivum_class_II | 728 | 729 |
| T. pseudonana_269347_ | 730 | 731 |
| V. carteri_75802_ | 732 | 733 |
| Z. mays_TC425293_ | 734 | 735 |
| A. thaliana_AT1G18090.1_III | 736 | 737 |
| A. thaliana_AT1G29630.2_III | 738 | 739 |
| C. vulgaris_30308_ | 740 | 741 |
| Chlorella_24009_ | 742 | 743 |
| D. melanogaster_tos-PA_III | 744 | 745 |
| G. max_Glyma05g29660.1_ | 746 | 747 |
| G. max_Glyma07g11320.1_ | 748 | 749 |
| H. sapiens_NM_130398.2_ | 750 | 751 |
| M. truncatula_AC153460_23.4_ | 752 | 753 |
| O. 1ucimarinus_13915_ | 754 | 755 |
| O. sativa_LOC_Os01g56940.1_III | 756 | 757 |
| P. patens_114516_ | 758 | 759 |
| P. patens_194153_ | 760 | 761 |
| P. trichocarpa_scaff_XI.493_III | 762 | 763 |
| P. trichocarpa_scaff_XV.367_ | 764 | 765 |
| S. cerevisiae_YDR263C_ | 766 | 767 |
| S. cerevisiae_YOR033C_ | 768 | 769 |
| S. moellendorffii_175620_ | 770 | 771 |
| V. carteri_61592_ | 772 | 773 |
| S. cerevisiae_YGR258C_ | 774 | 775 |
| A. thaliana_AT3G48900.2_IV | 776 | 777 |
| O. sativa_LOC_Os08g01130.1_IVa | 778 | 779 |
| P. trichocarpa_scaff_XV.1202_ | 780 | 781 |
| S. bicolor_Sb07g000270.1_ | 782 | 783 |
| V. vinifera_GSVIVT00009204001_ | 784 | 785 |
| A. thaliana_AT1G01880.1_ | 786 | 787 |
| O. sativa_LOC_Os09g35000.1_IVb | 788 | 789 |
| P. trichocarpa_scaff_XIV.232_ | 790 | 791 |
| S. bicolor_Sb02g030290.1_ | 792 | 793 |
| V. vinifera_GSVIVT00026338001_ | 794 | 795 |
| D. melanogaster_Gen-PA_V | 796 | 797 |
| H. sapiens_NM_182625.2_ | 798 | 799 |
| A. thaliana_AT1G74390.1_ | 800 | 801 |
| A. thaliana_AT4G39810.1_ | 802 | 803 |
| A. thaliana_AT5G07710.1_ | 804 | 805 |
| A. thaliana_AT5G61390.1_ | 806 | 807 |
| G. max_Glyma05g00890.1_ | 808 | 809 |
| G. max_Glyma17g11030.1_ | 810 | 811 |
| O. sativa_LOC_Os05g01200.1_ | 812 | 813 |
| O. sativa_LOC_Os10g26720.1_ | 814 | 815 |
| O. sativa_LOC_Os10g26730.1_ | 816 | 817 |
| O. sativa_LOC_Os10g29090.1_ | 818 | 819 |
| P. trichocarpa_scaff_129.36_ | 820 | 821 |
| P. trichocarpa_scaff_V.182_ | 822 | 823 |
| P. trichocarpa_scaff_VII.573_ | 824 | 825 |
| S. cerevisiae_YER041W_ | 826 | 827 |

[0653] Sequences have been tentatively assembled and publicly disclosed by research institutions, such as The Institute for Genomic Research (TIGR; beginning with TA). The Eukaryotic Gene Orthologs (EGO) database may be used to identify such related sequences, either by keyword search or by using the BLAST algorithm with the nucleic acid sequence or polypeptide sequence of interest. Special nucleic acid sequence databases have been created for particular organisms, such as by the Joint Genome Institute. Furthermore, access to proprietary databases, has allowed the identification of novel nucleic acid and polypeptide sequences.

### 6. YiAP2 Polypeptides

[0654] Sequences (full length cDNA, ESTs or genomic) related to SEQ ID NO: 835 and SEQ ID NO: 836 were identified amongst those maintained in the Entrez Nucleotides database at the National Center for Biotechnology Information (NCBI) using database sequence search tools, such as the Basic Local Alignment Tool (BLAST) (Altschul et al. (1990) J. Mol. Biol. 215:403-410; and Altschul et al. (1997) Nucleic Acids Res. 25:3389-3402). The program is used to find regions of local similarity between sequences by comparing nucleic acid or polypeptide sequences to sequence databases and by calculating the statistical significance of matches. For example, the polypeptide encoded by the nucleic acid of SEQ ID NO: 835 was used for the TBLASTN algorithm, with default settings and the filter to ignore low complexity sequences set off. The output of the analysis was viewed by pairwise comparison, and ranked according to the probability score (E-value), where the score reflect the probability that a particular alignment occurs by chance (the lower the E-value, the more significant the hit). In addition to E-values, comparisons were also scored by percentage identity. Percentage identity refers to the number of identical nucleotides (or amino acids) between the two compared nucleic acid (or polypeptide) sequences over a particular length. In some instances, the default parameters may be adjusted to modify the stringency of the search. For example the E-value may be increased to show less stringent matches. This way, short nearly exact matches may be identified.

[0655] Table A6 provides a list of nucleic acid sequences related to SEQ ID NO: 835 and SEQ ID NO: 836.

TABLE A6
Examples of YiAP2 polypeptides:

| | Nucleic acid | Polypeptide |
|---|---|---|
| Name | SEQ ID NO: | SEQ ID NO: |
| Medtr_AP2 | 835 | 836 |
| A. thaliana_AT1G16060.1#1 | 837 | 838 |
| Aquilegia_sp_TC20979#1 | 839 | 840 |
| C. clementina_DY288437#1 | 841 | 842 |
| C. clementina_DY290073#1 | 843 | 844 |
| C. clementina_DY301305#1 | 845 | 846 |
| C. clementina_TC1922#1 | 847 | 848 |
| C. clementina_TC2567#1 | 849 | 850 |
| C. sinensis_EY655317#1 | 851 | 852 |
| C. sinensis_EY726128#1 | 853 | 854 |
| C. sinensis_TC9216#1 | 855 | 856 |
| G. hirsutum_TC125414#1 | 857 | 858 |
| G. max_Glyma07g02380.1#1 | 859 | 860 |
| G. max_Glyma17g07860.1#1 | 861 | 862 |
| M. truncatula_AC126784_13.5#1 | 863 | 864 |
| O. basilicum_TA1087_39350#1_ | 865 | 866 |
| O. sativa_LOC_Os08g34360.1#1 | 867 | 868 |
| O. sativa_LOC_Os09g25600.1#1 | 869 | 870 |
| P. trichocarpa_800184#1 | 871 | 872 |
| R. communis_EG658396#1 | 873 | 874 |
| R. communis_TA2948_3988#1 | 875 | 876 |
| S. bicolor_Sb02g025080.1#1 | 877 | 878 |
| S. tuberosum_TC187592#1 | 879 | 880 |
| Triphysaria_sp_TC12598#1 | 881 | 882 |
| V. vinifera_GSVIVT00017130001#1 | 883 | 884 |
| Z. mays_TC386652#1 | 885 | 886 |

[0656] Sequences have been tentatively assembled and publicly disclosed by research institutions, such as The Institute for Genomic Research (TIGR; beginning with TA). The Eukaryotic Gene Orthologs (EGO) database may be used to identify such related sequences, either by keyword search or by using the BLAST algorithm with the nucleic acid sequence or polypeptide sequence of interest. Special nucleic acid sequence databases have been created for particular organisms, such as by the Joint Genome Institute. Furthermore, access to proprietary databases, has allowed the identification of novel nucleic acid and polypeptide sequences.

### Example 2

### Alignment of Sequences Related to the Polypeptide Sequences Used in the Methods of the Invention

### 1. FSM1-Like (Fruit Sant/Myb) Polypeptides

[0657] Alignment of a number of FSM1-like polypeptide sequences was performed using the ClustalW 2.0 algorithm of progressive alignment (Thompson et al. (1997) Nucleic Acids Res 25:4876-4882; Chenna et al. (2003). Nucleic Acids Res 31:3497-3500) with standard setting (slow alignment, similarity matrix: Gonnet, gap opening penalty 10, gap extension penalty: 0.2). Minor manual editing was done to further optimise the alignment. The FSM1-like polypeptides are aligned in FIG. 2.

[0658] A phylogenetic tree of FSM1-like polypeptides was constructed as follows: the alignment was generated using MAFFT (Katoh and Toh (2008) Briefings in Bioinformatics 9:286-298). A neighbour-joining tree was calculated using QuickTree (Howe et al. (2002), Bioinformatics 18(11): 1546-7), 100 bootstrap repetitions. The circular cladogram was drawn using Dendroscope (Huson et al. (2007), BMC Bioinformatics 8(1):460). Confidence for 100 bootstrap repetitions is indicated for major branching.

### 2. PIF3-Like (Phytochrome Interacting Factor 3) Polypeptides

[0659] Alignment of polypeptide sequences was performed using the ClustalW 2.0 algorithm of progressive alignment (Thompson et al. (1997) Nucleic Acids Res 25:4876-4882; Chenna et al. (2003). Nucleic Acids Res 31:3497-3500) with standard setting (slow alignment, similarity matrix: Gonnet, gap opening penalty 10, gap extension penalty: 0.2). Minor manual editing was done to further optimise the alignment. Minor manual editing was done to further optimise the alignment. The PIF3-like polypeptides are aligned in FIG. 6.

[0660] A phylogenetic tree of PIF3-like polypeptides was constructed using MAFFT (Katoh and Toh (2008) Briefings in Bioinformatics 9:286-298). A neighbour-joining tree was calculated using QuickTree (Howe et al. (2002), Bioinformatics 18(11): 1546-7), 100 bootstrap repetitions. The slanted cladogram was drawn using Dendroscope (Huson et al. (2007), BMC Bioinformatics 8(1):460). Confidence for 100 bootstrap repetitions is indicated for the major branches.

### 3. UROD (Uroporphyrinogen III Decarboxylase) Polypeptide

[0661] Alignment of polypeptide sequences was performed using the ClustalW 2.0 algorithm of progressive alignment (Thompson et al. (1997) Nucleic Acids Res 25:4876-4882; Chenna et al. (2003). Nucleic Acids Res 31:3497-3500) with standard setting (slow alignment, similarity matrix: Gonnet (Blosum 62 for polypeptide alignment) gap opening penalty 10, gap extension penalty: 0.2). Minor manual editing was done to further optimise the alignment. An alignment of UROD polypeptides is shown in FIG. 8.

[0662] A phylogenetic tree of UROD polypeptides was constructed as described under the Description of Figures.

### 4. AS-MTT (Abiotic Stress Membrane Tethered Transcription Factor) Polypeptides

[0663] Alignment of polypeptide sequences was performed using the CLUSTAL 2.0.11 algorithm of progressive alignment (Thompson et al. (1997) Nucleic Acids Res 25:4876-4882; Chenna et al. (2003). Nucleic Acids Res 31:3497-3500) with standard setting (slow alignment, gap opening penalty 10, gap extension penalty: 0.2). Minor manual editing was done to further optimise the alignment. The AS-MTT polypeptides are aligned in FIG. 10.

[0664] To perform phylogenetic analysis the polypeptides of Table A4 were aligned using MAFT (Katoh and Toh (2008). Briefings in Bioinformatics 9:286-298.). A neighbour-joining tree was calculated using QuickTree1.1 (Howe et al. (2002). Bioinformatics 18(11):1546-7). A cladogram was drawn using Dendroscope2.0.1 (Hudson et al. (2007). Bioinformatics 8(1):460). The polypeptide represented by SEQ ID NO: 2 clustered with the polypeptides of clade A. Polypeptides in clade B represent closer evolutionary related SEQ ID NO: 537 homologues.

[0665] Polypeptides falling within clade A are the following: P.trichocarpa_566293#1_A, P.trichocarpa_657115#1_A, P.trichocarpa_657115#1.2_A, P.persica_TC1247#1_A, M.domestica_TC12261#1_A, G.hirsutum_TC83567#1_A, A.thaliana_AT2G02730.1#1_A, A.thaliana_AT1G27000.1#1_A, M.domestica_TC9509#1_A, B.napus_TC66611#1_A, C.sinensis_TC3201#1_A, M.truncatula_AC136286_4.4#1_A.

[0666] Polypeptides falling within clade B are the following: S.officinarum_TC86637#1_B, P.americana_TA1256_3435#1_B, C.maculosa_TA1398_215693#1_B, O.sativa_LOC_Os01g08990.1#1_B, O.sativa_LOC_Os05g08980.1#1_B, T.officinale_TA751_50225#1_B, F.arundinacea_TC6829#1_B, S.bicolor_Sb03g003440.1#1_B, I.nil_TC6724#1_B, S.tuberosum_TC170010#1_B, Aquilegia_sp_TC25212#1_B, V.vinifera_GSVIVT00029000001#1_B, H.annuus_TC32349#1_B.

### 5. EXO-1 Polypeptide

[0667] The alignment was generated using MAFFT (Katoh and Toh (2008) Briefings in Bioinformatics 9:286-298). A phylogenetic tree of EXO-1 polypeptides was constructed using a neighbour-joining tree, which was calculated using Quick-Tree (Howe et al. (2002), Bioinformatics 18(11): 1546-7), 100 bootstrap repetitions. The circular phylogram was drawn using Dendroscope (Huson et al. (2007), BMC Bioinformatics 8(1):460). Confidence for 100 bootstrap repetitions is indicated for major branching. Major branching position is indicated by circles.

### 6. YiAP2 Polypeptides

[0668] A multiple alignment of YiAP2 polypeptides (FIG. 15) was performed using default values (gap open penalty of 10, for the gap extension penalty of 0,1 and the selected weight matrix is Blosum 62) with the align algorithm as provided in the AlignX programme from the Vector NTI (Invitrogen), which is based on the ClustalW algorithm of progressive alignment (Thompson et al. (1997) Nucleic Acids Res 25:4876-4882; Chenna et al. (2003). Nucleic Acids Res 31:3497-3500).

### Example 3

### Calculation of Global Percentage Identity Between Polypeptide Sequences Useful in Performing the Methods of the Invention

[0669] Global percentages of similarity and identity between full length polypeptide sequences useful in performing the methods of the invention were determined using one of the methods available in the art, the MatGAT (Matrix Global Alignment Tool) software (BMC Bioinformatics. 2003 4:29. MatGAT: an application that generates similarity/identity matrices using protein or DNA sequences. Campanella J J, Bitincka L, Smalley J; software hosted by Ledion Bitincka). MatGAT software generates similarity/identity matrices for DNA or protein sequences without needing pre-alignment of the data. The program performs a series of pair-wise alignments using the Myers and Miller global alignment algorithm (with a gap opening penalty of 12, and a gap extension penalty of 2), calculates similarity and identity using for example Blosum 62 (for polypeptides), and then places the results in a distance matrix. Sequence similarity is shown in the bottom half of the dividing line and sequence identity is shown in the top half of the diagonal dividing line.

[0670] Parameters used in the comparison were: Scoring matrix: Blosum62, First Gap: 12, Extending Gap: 2.

### 1. FSM1-Like (Fruit Sant/Myb) Polypeptides

[0671] Results of the analysis are shown in Table B1 for the global similarity and identity over the full length of a number of FSM1-like polypeptide sequences. The sequence identity (in %) between the FSM1-like polypeptide sequences useful in performing the methods of the invention is generally 50% or higher compared to SEQ ID NO: 2, but can be as low as 19% within the group of FSM1-like polypeptides given in the sequence listing.

TABLE B1
MatGAT results for global similarity and identity over the full length of the polypeptide sequences.

| | | 1 | 2 | 3 | 4 | 5 | 6 | 7 | 8 | 9 | 10 | 11 | 12 | 13 |
|---|---|---|---|---|---|---|---|---|---|---|---|---|---|---|
| 1. | M. guttatus_DV207881 | | 59.4 | 55.7 | 59.0 | 61.2 | 57.4 | 52.9 | 57.8 | 60.5 | 63.9 | 62.8 | 62.7 | 63.9 |
| 2. | A. majus_TA4522_4151 | 71.0 | | 54.2 | 58.3 | 58.1 | 69.3 | 68.6 | 59.8 | 58.3 | 61.3 | 63.9 | 61.2 | 61.9 |
| 3. | S. lycopersicum_TA46686 | 70.5 | 73.1 | | 79.5 | 63.6 | 62.4 | 60.8 | 63.6 | 67.0 | 64.8 | 68.2 | 67.4 | 68.2 |
| 4. | N. benthamiana_EH366122 | 74.7 | 73.1 | 86.4 | | 69.0 | 57.4 | 59.8 | 73.2 | 69.8 | 74.1 | 72.9 | 78.3 | 78.0 |
| 5. | G. hirsutum_DR461014 | 77.1 | 72.0 | 72.7 | 80.2 | | 56.4 | 61.8 | 72.9 | 72.1 | 72.8 | 75.3 | 70.6 | 71.8 |
| 6. | V. vinifera_EE072107 | 67.3 | 77.2 | 69.3 | 65.3 | 71.3 | | 77.5 | 63.4 | 65.3 | 59.4 | 68.3 | 63.4 | 64.4 |
| 7. | M. donnestica_DR994824 | 66.7 | 82.4 | 71.6 | 66.7 | 70.6 | 88.2 | | 68.6 | 69.9 | 61.8 | 72.8 | 69.6 | 71.6 |
| 8. | G. hirsutum_TA31277_3635 | 72.3 | 73.1 | 76.1 | 84.0 | 87.7 | 70.3 | 73.5 | | 80.2 | 79.3 | 80.2 | 80.7 | 81.7 |
| 9. | G. hirsutum_DW503354 | 76.7 | 74.2 | 78.4 | 79.1 | 84.9 | 74.3 | 77.5 | 86.0 | | 73.3 | 83.7 | 77.9 | 79.1 |
| 10. | H. exilis_EE652824 | 77.1 | 71.0 | 73.9 | 80.2 | 80.2 | 66.3 | 66.7 | 86.3 | 81.4 | | 76.5 | 79.5 | 81.7 |
| 11. | E. gunnii_CT985658 | 77.6 | 78.5 | 79.5 | 81.2 | 84.7 | 77.2 | 79.4 | 85.9 | 90.7 | 80.0 | | 84.9 | 84.9 |
| 12. | L. sativa_TA7946_4236 | 75.9 | 78.5 | 77.3 | 84.3 | 86.7 | 74.3 | 75.5 | 91.6 | 88.4 | 84.3 | 91.8 | | 96.4 |
| 13. | C. intybus_EH706852 | 75.9 | 77.4 | 77.3 | 84.1 | 87.8 | 75.2 | 76.5 | 91.5 | 89.5 | 85.4 | 90.6 | 96.4 | |
| 14. | P. trichocarpa_sc_IV.1184 | 64.3 | 80.6 | 73.5 | 73.5 | 74.5 | 82.2 | 84.3 | 77.6 | 80.6 | 71.4 | 79.6 | 80.6 | 80.6 |
| 15. | P. trichocarpa_557252 | 70.1 | 76.3 | 78.4 | 79.3 | 82.8 | 76.2 | 76.5 | 85.1 | 89.7 | 80.5 | 89.7 | 90.8 | 88.5 |
| 16. | P. euphratica_AJ768574 | 71.3 | 77.4 | 79.5 | 80.5 | 83.9 | 77.2 | 77.5 | 86.2 | 90.8 | 79.3 | 90.8 | 92.0 | 89.7 |
| 17. | M. truncatula_AC135566 | 65.9 | 82.8 | 73.6 | 72.5 | 71.4 | 72.3 | 75.5 | 71.4 | 72.5 | 67.0 | 71.4 | 72.5 | 72.5 |
| 18. | G. max_Glyma06g46590.1 | 65.2 | 83.9 | 72.8 | 70.7 | 76.1 | 76.2 | 80.4 | 77.2 | 77.2 | 67.4 | 73.9 | 78.3 | 78.3 |
| 19. | G. max_Glyma04g16390.1 | 66.3 | 83.9 | 75.0 | 70.7 | 75.0 | 78.2 | 82.4 | 77.2 | 78.3 | 69.6 | 75.0 | 79.3 | 79.3 |
| 20. | G. max_Glyma02g18210.1 | 65.6 | 81.7 | 69.9 | 69.9 | 71.0 | 76.2 | 78.4 | 72.0 | 75.3 | 65.6 | 72.0 | 75.3 | 74.2 |
| 21. | M. truncatula_AC157502 | 64.1 | 80.6 | 71.7 | 70.7 | 78.3 | 80.2 | 81.4 | 76.1 | 77.2 | 70.7 | 76.1 | 79.3 | 78.3 |
| 22. | G. max_Glyma03g28050.1 | 64.9 | 80.4 | 69.1 | 68.0 | 70.1 | 81.2 | 80.4 | 71.1 | 74.2 | 70.1 | 76.3 | 77.3 | 76.3 |
| 23. | A. thaliana_At4g39250 | 63.0 | 77.0 | 68.0 | 65.0 | 67.0 | 84.2 | 85.3 | 69.0 | 72.0 | 65.0 | 73.0 | 73.0 | 72.0 |
| 24. | T. salsuginea_DN773374 | 58.0 | 76.0 | 65.0 | 67.0 | 66.0 | 81.2 | 84.3 | 69.0 | 73.0 | 64.0 | 70.0 | 69.0 | 71.0 |
| 25. | B. napus_BN06MC20309 | 56.0 | 73.0 | 62.0 | 64.0 | 63.0 | 79.2 | 81.4 | 66.0 | 70.0 | 62.0 | 68.0 | 68.0 | 68.0 |
| 26. | A. thaliana_At2g21650 | 57.4 | 78.2 | 65.3 | 66.3 | 66.3 | 82.2 | 84.3 | 68.3 | 72.3 | 64.4 | 69.3 | 70.3 | 69.3 |
| | | 14 | 15 | 16 | 17 | 18 | 19 | 20 | 21 | 22 | 23 | 24 | 25 | 26 |
| 1. | M. guttatus_DV207881 | 52.0 | 56.3 | 57.5 | 54.7 | 52.6 | 53.7 | 51.6 | 55.3 | 51.5 | 49.0 | 43.0 | 43.0 | 44.6 |
| 2. | A. majus_TA4522_4151 | 66.7 | 62.9 | 63.9 | 64.9 | 64.2 | 65.3 | 66.0 | 69.1 | 64.9 | 57.0 | 56.4 | 55.4 | 58.8 |
| 3. | S. lycopersicum_TA46686 | 60.2 | 62.5 | 63.6 | 60.0 | 62.1 | 62.1 | 52.6 | 56.4 | 58.6 | 56.0 | 52.0 | 50.0 | 54.5 |
| 4. | N. benthamiana_EH366122 | 64.3 | 67.8 | 69.0 | 56.4 | 55.9 | 57.0 | 53.2 | 58.1 | 60.2 | 55.0 | 53.0 | 51.0 | 56.4 |
| 5. | G. hirsutum_DR461014 | 60.2 | 69.0 | 70.1 | 60.4 | 65.6 | 64.5 | 58.1 | 64.1 | 59.8 | 55.0 | 54.0 | 50.0 | 55.4 |
| 6. | V. vinifera_EE072107 | 71.3 | 68.3 | 69.3 | 59.8 | 63.7 | 64.7 | 62.4 | 69.3 | 66.3 | 68.3 | 64.4 | 63.4 | 68.6 |
| 7. | M. domestica_DR994824 | 74.5 | 70.6 | 71.6 | 65.0 | 71.8 | 69.9 | 61.8 | 69.6 | 69.2 | 70.6 | 66.7 | 63.7 | 70.6 |
| 8. | G. hirsutum_TA31277_3635 | 68.4 | 79.3 | 80.5 | 58.9 | 69.1 | 68.1 | 57.9 | 64.9 | 62.6 | 61.0 | 60.0 | 54.0 | 59.4 |
| 9. | G. hirsutum_DW503354 | 68.4 | 78.2 | 79.3 | 55.8 | 65.3 | 66.3 | 57.9 | 63.8 | 65.7 | 63.4 | 57.4 | 55.4 | 57.4 |
| 10. | H. exilis_EE652824 | 67.3 | 74.7 | 73.6 | 58.2 | 55.9 | 57.0 | 51.6 | 58.7 | 61.9 | 55.0 | 52.0 | 49.0 | 54.5 |
| 11. | E. gunnii_CT985658 | 73.5 | 83.9 | 85.1 | 60.6 | 65.6 | 64.5 | 58.5 | 67.7 | 68.4 | 65.3 | 56.4 | 55.4 | 60.4 |
| 12. | L. sativa_TA7946_4236 | 71.4 | 79.5 | 80.7 | 58.9 | 62.1 | 61.1 | 55.8 | 64.9 | 64.6 | 62.4 | 55.0 | 53.5 | 59.4 |
| 13. | C. intybus_EH706852 | 72.4 | 79.3 | 80.5 | 60.0 | 63.2 | 62.1 | 55.8 | 63.8 | 64.6 | 63.0 | 56.0 | 54.0 | 59.4 |
| 14. | P. trichocarpa_sc_IV.1184 | | 80.6 | 81.6 | 58.6 | 59.6 | 58.6 | 57.1 | 65.3 | 63.6 | 64.0 | 59.0 | 56.0 | 63.4 |
| 15. | P. trichocarpa_557252 | 85.7 | | 98.9 | 57.9 | 64.9 | 64.9 | 57.9 | 68.1 | 65.7 | 63.0 | 62.0 | 59.0 | 65.3 |
| 16. | P. euphratica_AJ768574 | 86.7 | 98.9 | | 58.9 | 66.0 | 64.9 | 58.9 | 67.0 | 64.6 | 64.0 | 61.0 | 58.0 | 64.4 |
| 17. | M. truncatula_AC135566 | 74.5 | 71.4 | 72.5 | | 80.6 | 79.6 | 72.3 | 72.0 | 73.5 | 58.4 | 60.4 | 60.4 | 59.8 |
| 18. | G. max_Glyma06g46590.1 | 75.5 | 76.1 | 77.2 | 88.0 | | 92.4 | 74.5 | 76.3 | 76.5 | 67.3 | 66.3 | 62.4 | 64.7 |
| 19. | G. max_Glyma04g16390.1 | 76.5 | 78.3 | 78.3 | 90.2 | 96.7 | | 77.7 | 77.4 | 75.5 | 67.3 | 66.3 | 62.4 | 65.7 |
| 20. | G. max_Glyma02g18210.1 | 75.5 | 73.1 | 74.2 | 86.0 | 89.2 | 89.2 | | 76.6 | 72.2 | 61.0 | 59.0 | 60.0 | 61.4 |
| 21. | M. truncatula_AC157502 | 80.6 | 80.4 | 79.3 | 83.7 | 88.0 | 89.1 | 86.0 | | 79.4 | 66.0 | 66.0 | 64.0 | 65.3 |
| 22. | G. max_Glyma03g28050.1 | 79.6 | 77.3 | 76.3 | 82.5 | 87.6 | 89.7 | 85.6 | 90.7 | | 65.7 | 62.7 | 61.8 | 64.1 |
| 23. | A. thaliana_At4g39250 | 78.0 | 74.0 | 75.0 | 75.0 | 81.0 | 81.0 | 81.0 | 77.0 | 80.0 | | 75.0 | 72.0 | 73.3 |
| 24. | T. salsuginea_DN773374 | 77.0 | 74.0 | 73.0 | 77.0 | 80.0 | 82.0 | 78.0 | 79.0 | 81.0 | 87.0 | | 88.0 | 89.1 |
| 25. | B. napus_BN06MC20309 | 74.0 | 71.0 | 70.0 | 75.0 | 77.0 | 79.0 | 75.0 | 76.0 | 78.0 | 84.0 | 97.0 | | 83.2 |
| 26. | A. thaliana_At2g21650 | 76.2 | 74.3 | 73.3 | 73.3 | 77.2 | 80.2 | 78.2 | 78.2 | 80.2 | 84.2 | 94.1 | 91.1 | |

### 2. PIF3-Like (Phytochrome Interacting Factor 3) Polypeptides

[0672] Results of the MatGat analysis are shown in Table B2 for the global similarity and identity over the full length of the polypeptide sequences. The sequence identity (in %) between the PIF3-like polypeptide sequences useful in performing the methods of the invention can be as low as 28.6%, and does not go higher than 47.2% when compared to SEQ ID NO: 293 (sequence 7, Os12g41650), which shows that outside of the conserved regions, there is little sequence conservation.

TABLE B2
MatGAT results for global similarity and identity over the full length of the
polypeptide sequences.

| | | 1 | 2 | 3 | 4 | 5 | 6 | 7 | 8 | 9 | 10 |
|---|---|---|---|---|---|---|---|---|---|---|---|
| 1. | AT2G43010_1 | | 56.9 | 33.7 | 35.9 | 34.8 | 30.4 | 32.4 | 38.6 | 38.3 | 33.6 |
| 2. | AT3G59060_1 | 72.9 | | 31.6 | 36.1 | 34.5 | 28.9 | 31.2 | 38.0 | 36.5 | 34.0 |
| 3. | Glyma02g45150_1 | 47.2 | 46.1 | | 64.2 | 62.1 | 31.9 | 28.6 | 40.1 | 50.5 | 42.4 |
| 4. | Glyma08g41620_1 | 51.4 | 49.2 | 73.1 | | 82.9 | 34.5 | 33.0 | 43.1 | 53.2 | 44.4 |
| 5. | Glyma18g14530_1 | 50.2 | 47.7 | 72.6 | 89.4 | | 33.1 | 30.3 | 43.6 | 50.4 | 42.0 |
| 6. | Os03g43810_1 | 44.5 | 42.7 | 43.1 | 48.4 | 46.3 | | 47.2 | 28.9 | 34.7 | 32.4 |
| 7. | Os12g41650_2 | 48.8 | 47.9 | 42.9 | 45.1 | 41.9 | 56.7 | | 32.0 | 33.8 | 34.9 |
| 8. | Pt_scaff_V_1141_1 | 53.6 | 56.9 | 52.0 | 58.2 | 57.7 | 44.1 | 49.1 | | 65.0 | 38.7 |
| 9. | Pt_TC100024_1 | 51.1 | 52.1 | 63.5 | 66.6 | 66.0 | 46.6 | 45.8 | 71.1 | | 48.7 |
| 10. | SI_TC192046_1 | 49.7 | 49.5 | 56.8 | 62.8 | 59.6 | 44.8 | 47.1 | 56.0 | 64.0 | |

### 3. UROD (Uroporphyrinogen III Decarboxylase) Polypeptide

[0673] Results of the software analysis are shown in Table B3 for the global similarity and identity over the full length of the polypeptide sequences. The sequence identity (in %) between the UROD polypeptide sequences useful in performing the methods of the invention can be as low as 24% (but is generally higher than 30%) compared to SEQ ID NO: 368.

TABLE B3
MatGAT results for global similarity and identity over the full length of the polypeptide sequences.

| | | 1 | 2 | 3 | 4 | 5 | 6 | 7 |
|---|---|---|---|---|---|---|---|---|
| 1. | H. vulgare_TC175532#1_SPT_HEM1 | | 88.5 | 86 | 87 | 65.4 | 66.7 | 66 |
| 2. | S. bicolor_Sb03g028330.1#1_SPT_HEM1 | | | 94.6 | 88.9 | 66.8 | 67.6 | 68.4 |
| 3. | Z. mays_ZM07MC20070_BFb0115I19@20019#1_SPT_HEM1 | | | | 86.9 | 65.4 | 65.3 | 67 |
| 4. | O. sativa_LOC_Os01g43390.1#1_SPT_HEM1 | | | | | 66.1 | 65.8 | 68 |
| 5. | A. thaliana_AT3G14930.1#1_SPT_HEM1 | | | | | | 89.8 | 71.5 |
| 6. | B. napus_TC76241#1_SPT_HEM1 | | | | | | | 73 |
| 7. | M. truncatula_AC119409_9.4#1_SPT_HEM1 | | | | | | | |
| 8. | G. max_Glyma12g35880.2#1_SPT_HEM1 | | | | | | | |
| 9. | G. max_Glyma13g34500.2#1_SPT_HEM1 | | | | | | | |
| 10. | P. trichocarpa_URO-D_Poplus_trichocarpa_SPT_HEM1 | | | | | | | |
| 11. | V. vinifera_GSVIVT00027816001#1_SPT_HEM1 | | | | | | | |
| 12. | Aquilegia_sp_TC24505#1_SPT_HEM1 | | | | | | | |
| 13. | S. lycopersicum_TC195523#1_SPT_HEM1 | | | | | | | |
| 14. | C. reinhardtii_186446#1_CHL_HEM1 | | | | | | | |
| 15. | C. vulgaris_61627#1_CHL_HEM2 | | | | | | | |
| 16. | Chlorella_32323#1_CHL_HEM2 | | | | | | | |
| 17. | O. lucimarinus_17656#1_CHL_HEM2 | | | | | | | |
| 18. | O. taurii_13162#1_CHL_HEM2 | | | | | | | |
| 19. | A. thaliana_AT2G40490.1#1_SPT_HEM2 | | | | | | | |
| 20. | B. napus_TC68105#1_SPT_HEM2 | | | | | | | |
| 21. | C. sinensis_TC316#1_SPT_HEM2 | | | | | | | |
| 22. | G. hirsutum_TC101219#1_SPT_HEM2 | | | | | | | |
| 23. | G. max_Glyma18g02490.1#1_SPT_HEM2 | | | | | | | |
| 24. | M. truncatula_AC149472_12.4#1_SPT_HEM2 | | | | | | | |
| 25. | M. domestica_TC16580#1_SPT_HEM2 | | | | | | | |
| 26. | N. tabacum_TC14277#1_SPT_HEM2 | | | | | | | |
| 27. | S. lycopersicum_TC209939#1_SPT_HEM2 | | | | | | | |
| 28. | O. basilicum_TA2234_39350#1_SPT_HEM2 | | | | | | | |
| 29. | O. sativa_LOC_Os03g21900.1#1_SPT_HEM2 | | | | | | | |
| 30. | S. bicolor_Sb01g036030.1#1_SPT_HEM2 | | | | | | | |
| 31. | P. taeda_TA15428_3352#1_SPT_HEM2 | | | | | | | |
| 32. | P. patens_188035#1_SPT_HEM2 | | | | | | | |
| 33. | S. moellendorffii_438672#1_SPT_HEM2 | | | | | | | |
| 34. | Cyanothece_sp._YP_001804380.1_Cyanothece_sp._BAC_Cyano | | | | | | | |
| 35. | Synechocystis_sp._NP_442753.1_Synechocystis_sp._BAC_Cyano | | | | | | | |
| 36. | Cyanothece_sp._YP_002373141.1_Cyanothece_sp._BAC_Cyano | | | | | | | |
| 37. | Cyanothece_sp._YP_002377951.1_BAC_Cyano | | | | | | | |
| 38. | M. aeruginosa_YP_001658143.1_Microcystis_aeruginosa_BAC_Cyano | | | | | | | |
| 39. | Synechococcus_sp._YP_001734083.1_Synechococcus_sp._BAC_Cyano | | | | | | | |
| 40. | T. erythraeum_YP_721451.1_Trichodesmium_erythraeum_BAC_Cyano | | | | | | | |
| 41. | P. marinus_YP_001014466.1_Prochlorococcus_marinus_BAC_Cyano | | | | | | | |
| 42. | P. marinus_YP_291214.1_Prochlorococcus_marinus_BAC_Cyano | | | | | | | |
| 43. | Synechococcus_sp._YP_376928.1_Synechococcus_sp._BAC_Cyano | | | | | | | |
| 44. | C. reinhardtii_195818#1_CHL_Others | | | | | | | |
| 45. | C. vulgaris_25726#1_CHL_Others | | | | | | | |
| 46. | O. lucimarinus_28976#1_CHL_Others | | | | | | | |
| 47. | O. RCC809_53774#1_CHL_Others | | | | | | | |
| 48. | O. taurii_14772#1_CHL_Others | | | | | | | |
| 49. | P. patens_112870#1_SPT_Others | | | | | | | |
| 50. | A. anophagefferens_30614#1_STR_Others | | | | | | | |
| 51. | P. tricornutum_20757#1_STR_Others | | | | | | | |
| 52. | T. pseudonana_3974#1_STR_Others | | | | | | | |
| 53. | A. fumigatus_XP_750255.1_Aspergillus_fumigatus_FUNGI_Non-P | | | | | | | |
| 54. | A. terreus_XP_001211750.1_Aspergillus_terreus_FUNGI_Non-P | | | | | | | |
| 55. | G. zeae_XP_381537.1_Gibberella_zeae_FUNGI_Non-P | | | | | | | |
| 56. | A. gossypii_NP_986457.1_AGL210Cp_Ashbya_gossypii_FUNGI_Non-P | | | | | | | |
| 57. | C. glabrata_XP_447163.1_Candida_glabrata_FUNGI_Non-P | | | | | | | |
| 58. | C. albicans_EAK98116.1_Candida_albicans_FUNGI_Non-P | | | | | | | |
| 59. | D. hansenii_XP_460636.1_Debaryomyces_hansenii_FUNGI_Non-P | | | | | | | |
| 60. | P. stipitis_XP_001384951.1_Pichia_stipitis_FUNGI_Non-P | | | | | | | |
| 61. | S. pombe_NP_588085.2_Schizosaccharomyces_pombe_FUNGI_Non-P | | | | | | | |
| 62. | D. melanogasterNP_610501.1_Drosophila_melanogaster_INSECT_Non-P | | | | | | | |
| 63. | D. simulans_XP_002080776.1_GD10665_Drosophila_simulans_INSECT_Non-P | | | | | | | |
| 64. | Drosophila_yakuba_XP_002089810.1_Drosophila_yakuba_INSECT_Non-P | | | | | | | |
| 65. | D. pseudoobscura_XP_001361569.2_Drosophila_pseudoobscura_pseudoobscura_INSECT_Non-P | | | | | | | |
| 66. | T. castaneum_XP_972457.1_similar_to_Tribolium_castaneum_INSECT_Non-P | | | | | | | |
| 67. | H. sapiens_NP_000365.3_Homo_sapiens_HUMAN_Non-P | | | | | | | |
| 68. | D. discoideum_XP_629682.1_Dictyostelium_discoideum_PROTOZOA_Non-P | | | | | | | |
| 69. | P. berghei_CAH96991.1_putative_Plasmodium_berghei_PROTOZOA_Non-P | | | | | | | |
| 70. | P. chabaudi_CAH75805.1_putative_Plasmodium_chabaudi_chabaudi_PROTOZOA_Non-P | | | | | | | |
| 71. | P. falciparum_XP_966063.1_Plasmodium_falciparum_PROTOZOA_Non-P | | | | | | | |
| 72. | Plasmodium_yiyax_XP_001616097.1_Plasmodium_yiyax_PROTOZOA_Non-P | | | | | | | |

| 8 | 9 | 10 | 11 | 12 | 13 | 14 | 15 | 16 | 17 | 18 | 19 | 20 | 21 | 22 | 23 | 24 | 25 | 26 | 27 | 28 | 29 | 30 | 31 | 32 |
|---|---|---|---|---|---|---|---|---|---|---|---|---|---|---|---|---|---|---|---|---|---|---|---|---|
| 66.6 | 55.6 | 66.7 | 67 | 66.4 | 64.2 | 55.1 | 46 | 47.1 | 44.3 | 45 | 48.8 | 47.8 | 47 | 50.5 | 49.3 | 47.8 | 50.4 | 48.3 | 49.2 | 47.8 | 47.7 | 48.4 | 48.3 | 47.4 |
| 68.3 | 56.9 | 68 | 67.7 | 67.6 | 64.9 | 54.3 | 46.2 | 47.6 | 44.2 | 44.9 | 48.2 | 49.3 | 47.2 | 49.6 | 49.6 | 49.3 | 50.5 | 49.3 | 49.4 | 48.2 | 49.5 | 49.4 | 48 | 47.9 |
| 67.4 | 56.5 | 68 | 67.2 | 67.4 | 63 | 54.3 | 46.6 | 48 | 44.4 | 45.1 | 48.2 | 49.5 | 46.9 | 49.8 | 49 | 48.5 | 49.8 | 48.5 | 49.5 | 48.3 | 49.1 | 48.7 | 48 | 47.7 |
| 66.6 | 56 | 67.2 | 66.3 | 69.1 | 65.9 | 56.3 | 46.4 | 47.3 | 45.7 | 46.4 | 49.4 | 50 | 48.1 | 50.6 | 49.3 | 48.9 | 49.9 | 49.3 | 50.7 | 48.9 | 48.9 | 48.9 | 49.5 | 47.2 |
| 74.5 | 59.1 | 75 | 72.9 | 72.1 | 71.1 | 53.6 | 44.4 | 45.8 | 42.7 | 43.4 | 47.1 | 47 | 48.7 | 47.5 | 46.3 | 46.1 | 47.3 | 48.4 | 49.2 | 47.3 | 46.8 | 46.2 | 46.5 | 48.7 |
| 74.7 | 59.2 | 75.5 | 71.9 | 72.8 | 72.2 | 54 | 44.3 | 45 | 43.3 | 43.1 | 48 | 48.1 | 48.8 | 47.8 | 47.2 | 45.9 | 47.8 | 47.8 | 48.6 | 47.4 | 47.4 | 46.9 | 46.4 | 49.5 |
| 85.2 | 63.7 | 76.1 | 74.2 | 74.6 | 74.5 | 54.3 | 46.8 | 43.9 | 42.2 | 42.6 | 47.7 | 48.8 | 47.8 | 48.4 | 50 | 49.2 | 48.9 | 49.1 | 50.1 | 48.8 | 48 | 47.7 | 48.2 | 47.9 |
| | 71.9 | 79.4 | 78.2 | 75.4 | 72.5 | 54 | 46.6 | 44.4 | 42 | 42.7 | 46.3 | 48.1 | 47.9 | 48.4 | 48.3 | 47.8 | 46.9 | 48.3 | 47.8 | 48.8 | 47.3 | 47.5 | 47.8 | 47.4 |
| | | 62 | 63.8 | 58.1 | 55.6 | 42.8 | 40.1 | 34.7 | 38.6 | 39.7 | 36.3 | 37.3 | 37.6 | 37 | 38 | 37.5 | 36.7 | 37.6 | 38.1 | 37.5 | 37.4 | 36.6 | 37.1 | 35.1 |
| | | | 82.2 | 76.1 | 75.4 | 52.6 | 46.8 | 43.8 | 42.4 | 42.2 | 47.7 | 48.3 | 47.3 | 47.6 | 47.8 | 48.1 | 46.4 | 47.5 | 46.6 | 49.8 | 47.4 | 48.2 | 47.7 | 46.7 |
| | | | | 77.3 | 73.2 | 52.8 | 46.3 | 43.9 | 42.3 | 42.3 | 47.7 | 47.8 | 46.6 | 46.6 | 47.4 | 47.2 | 47.3 | 48.6 | 48 | 48.6 | 46.6 | 47.3 | 46.6 | 44.6 |
| | | | | | 75.8 | 54.7 | 46.1 | 44.7 | 43.5 | 44.4 | 48.1 | 49 | 48.6 | 48.8 | 47.6 | 48.6 | 48.3 | 50.5 | 50 | 48.1 | 46.7 | 47.1 | 48.4 | 48.2 |
| | | | | | | 52.9 | 44.2 | 44.1 | 41.6 | 41.8 | 46.2 | 46.3 | 46.3 | 46.3 | 46.6 | 46.6 | 45.6 | 47.2 | 48.2 | 48 | 45.9 | 45.8 | 46.1 | 46.5 |
| | | | | | | | 50.1 | 50.6 | 48.1 | 49.6 | 50.2 | 50.8 | 52.4 | 51.9 | 52.4 | 51 | 52.5 | 51.8 | 52.5 | 52.7 | 53.1 | 51.7 | 51.1 | 50.6 |
| | | | | | | | | 61.4 | 59.8 | 60.6 | 58.8 | 59.3 | 59.3 | 59.4 | 59.4 | 57.5 | 57.8 | 58.3 | 59.5 | 59.9 | 58.2 | 57.6 | 59.8 | 59.3 |
| | | | | | | | | | 52.5 | 53 | 55.4 | 54.9 | 55.6 | 56.3 | 55.1 | 55 | 54.9 | 55.1 | 56.3 | 54.3 | 57.6 | 56.1 | 54.5 | 58.4 |
| | | | | | | | | | | 92.3 | 55.3 | 56 | 55.4 | 55.3 | 53.5 | 52.7 | 54 | 54 | 53.6 | 54.8 | 53.8 | 53.3 | 55.2 | 54.5 |
| | | | | | | | | | | | 54.3 | 55 | 55.2 | 55.3 | 54.3 | 53.5 | 54.8 | 54.5 | 54.4 | 55.6 | 54.9 | 54.3 | 54.7 | 54.3 |
| | | | | | | | | | | | | 93.7 | 78.2 | 78.7 | 78.5 | 76 | 78.5 | 77.2 | 77.9 | 76.6 | 74.4 | 74.9 | 71.9 | 66.4 |
| | | | | | | | | | | | | | 78.4 | 79.5 | 80.1 | 77.2 | 79 | 78.8 | 79.5 | 77 | 74.5 | 74.9 | 72.3 | 65.7 |
| | | | | | | | | | | | | | | 84.8 | 83.5 | 79.9 | 82.3 | 81.1 | 81.7 | 81.7 | 77.5 | 74.4 | 74.4 | 65.7 |
| | | | | | | | | | | | | | | | 84.4 | 81.2 | 82.9 | 82.6 | 84.4 | 82.7 | 75.7 | 76.2 | 73.3 | 66.7 |
| | | | | | | | | | | | | | | | | 87.9 | 82.6 | 81.6 | 82.5 | 81.1 | 77 | 75.6 | 71.9 | 65.2 |
| | | | | | | | | | | | | | | | | | 80.6 | 80.2 | 82.3 | 82.8 | 75.2 | 73.6 | 71.1 | 62.8 |
| | | | | | | | | | | | | | | | | | | 80.7 | 81.3 | 81.3 | 77.8 | 76.7 | 73.9 | 66.2 |
| | | | | | | | | | | | | | | | | | | | 90.8 | 83.9 | 76.5 | 75.4 | 73.4 | 66 |
| | | | | | | | | | | | | | | | | | | | | 84 | 76.8 | 74.9 | 73.1 | 66.7 |
| | | | | | | | | | | | | | | | | | | | | | 76.1 | 74.7 | 73.7 | 65.9 |
| | | | | | | | | | | | | | | | | | | | | | | 91.6 | 73 | 64.7 |
| | | | | | | | | | | | | | | | | | | | | | | | 72.4 | 65.2 |
| | | | | | | | | | | | | | | | | | | | | | | | | 65.2 |
| 33 | 34 | 35 | 36 | 37 | 38 | 39 | 40 | 41 | 42 | 43 | 44 | 45 | 46 | 47 | 48 | 49 | 50 | 51 | 52 | 53 | 54 | 55 | 56 | 57 |
| 46.4 | 45.8 | 44.3 | 46.8 | 46.8 | 45.8 | 45.5 | 48.3 | 46 | 45.5 | 45.8 | 42.4 | 44.2 | 41.9 | 43.1 | 41.4 | 40.2 | 39.9 | 37.4 | 36.1 | 29 | 30 | 29.4 | 28.6 | 27.9 |
| 46.6 | 45.9 | 43.7 | 45.9 | 47.4 | 45.9 | 45.4 | 47.9 | 46.4 | 45.9 | 47.2 | 42 | 43.3 | 41.4 | 43.6 | 41.1 | 41.1 | 39 | 36.9 | 36.1 | 29.7 | 31.8 | 30.3 | 28.3 | 28.1 |
| 46.1 | 46.6 | 43.9 | 46.4 | 47.1 | 46.4 | 44.6 | 48.1 | 46.4 | 45.9 | 46.4 | 42.2 | 43.6 | 41.5 | 42.8 | 41.4 | 41.2 | 39.8 | 36.7 | 36.6 | 30 | 31 | 31.1 | 28.3 | 27.8 |
| 47.1 | 47.1 | 44.2 | 46.9 | 47.4 | 45.9 | 45.7 | 48.1 | 46.7 | 46.2 | 47.1 | 42.8 | 42.5 | 42.1 | 43.8 | 42.6 | 40.6 | 40 | 37.8 | 35.9 | 30.3 | 31.9 | 32.6 | 29.4 | 28.4 |
| 45.6 | 46.3 | 44.9 | 46.3 | 46.8 | 45.6 | 45.1 | 45.1 | 44.6 | 44.2 | 43.9 | 41.9 | 43.2 | 40.2 | 41.7 | 39.8 | 40 | 40 | 34.5 | 33.6 | 27.9 | 28.7 | 27.3 | 26.7 | 26 |
| 46.1 | 46.2 | 45 | 45.5 | 46.9 | 46.2 | 45.7 | 45.2 | 44.7 | 44.3 | 45 | 40.6 | 43 | 41.1 | 41.3 | 40.1 | 39.9 | 40 | 36.5 | 34.9 | 27.8 | 29.9 | 28 | 27.7 | 26.3 |
| 47.2 | 46.1 | 45.1 | 46.1 | 47.5 | 45.8 | 46.8 | 48 | 47.2 | 47.4 | 48.8 | 43.2 | 41.6 | 41.1 | 40.8 | 40.6 | 40.6 | 40.3 | 36.9 | 36.5 | 28.3 | 28.5 | 27.5 | 26.7 | 26.2 |
| 47.7 | 46.3 | 46.1 | 46.3 | 46.8 | 45.4 | 46.8 | 47.3 | 46.8 | 46.8 | 48 | 44.8 | 42.7 | 40.5 | 40.8 | 40.4 | 40.6 | 40 | 35.9 | 35.6 | 28.1 | 29.6 | 28.3 | 27.5 | 25.6 |
| 36.4 | 41.2 | 40.4 | 41.2 | 41.9 | 40.7 | 40.9 | 43.1 | 42.3 | 42.5 | 43.4 | 35.8 | 35.6 | 31.7 | 34 | 32.2 | 33.6 | 31.9 | 25.1 | 26.7 | 25.6 | 23.8 | 25.8 | 23.8 | 23.2 |
| 44.7 | 45.6 | 44.6 | 45.3 | 46.1 | 45.1 | 45.8 | 47.1 | 46.3 | 46.3 | 47.1 | 43 | 43.1 | 41.7 | 40.6 | 40.6 | 40.8 | 40.2 | 33.3 | 33.3 | 27.3 | 29.3 | 27.7 | 26.7 | 25.2 |
| 45.5 | 47 | 44.8 | 45.8 | 47.5 | 44.8 | 46 | 48 | 46.8 | 46.8 | 47 | 42.2 | 42.5 | 42.3 | 41.2 | 41.7 | 40.5 | 39.3 | 33.8 | 35 | 29.2 | 29.3 | 28.6 | 27.3 | 27.3 |
| 47.3 | 45.9 | 44.7 | 44.9 | 46.4 | 44.2 | 45.4 | 45.9 | 46.4 | 45.9 | 46.4 | 41.6 | 42.2 | 41.9 | 41.4 | 41.4 | 39.7 | 39.3 | 34.2 | 35.9 | 27.9 | 28.8 | 28.3 | 26.8 | 26.8 |
| 45.8 | 44.2 | 44.2 | 44.9 | 45.1 | 42.8 | 44.7 | 44.9 | 45.6 | 45.1 | 46.6 | 40.6 | 39.8 | 40.4 | 39.8 | 41 | 38.5 | 39 | 35.1 | 36 | 28.6 | 29 | 27.4 | 25.6 | 25.3 |
| 51.4 | 49.4 | 49.1 | 49.6 | 50.6 | 48.1 | 49.9 | 47.8 | 47.3 | 47.3 | 49.1 | 41.8 | 43.6 | 45.9 | 44.7 | 43.7 | 41.1 | 41.2 | 39.2 | 39.2 | 32.6 | 34.6 | 33 | 31.9 | 29.5 |
| 61.5 | 59.9 | 58.7 | 58 | 58.4 | 57 | 58.4 | 56.6 | 55 | 55 | 57.7 | 39.3 | 41.3 | 41.4 | 43.4 | 42.1 | 40.9 | 41.7 | 36.1 | 35.1 | 31.8 | 30.7 | 32.3 | 30.8 | 30 |
| 56.8 | 50.4 | 49.5 | 47.1 | 50.8 | 50.8 | 50.3 | 47.9 | 49.6 | 49.4 | 50.4 | 41.7 | 43.4 | 43.2 | 44.8 | 41.6 | 41.2 | 42.1 | 38.2 | 38.4 | 31.1 | 31.4 | 30.1 | 30 | 29.6 |
| 55 | 54.8 | 55.7 | 53.7 | 56.4 | 55.4 | 55.1 | 54.2 | 52.6 | 52.3 | 55.1 | 41 | 41.3 | 43.9 | 46.6 | 43.7 | 39.2 | 41.3 | 35 | 36.1 | 33.2 | 30.8 | 31.1 | 32.9 | 32.7 |
| 54.5 | 54.2 | 55.1 | 53.4 | 55 | 53.7 | 54 | 53.1 | 51.4 | 51.1 | 53.1 | 41.5 | 41.8 | 42.2 | 45.2 | 42.4 | 39.7 | 41 | 35.6 | 35.9 | 33.4 | 31.8 | 31.9 | 34.2 | 34.3 |
| 67.8 | 54.3 | 52.3 | 52.3 | 52.6 | 52.5 | 53 | 53.3 | 52 | 51.8 | 54 | 41.7 | 41.7 | 43 | 43.2 | 43.8 | 42.2 | 41.7 | 37.5 | 38.6 | 32.6 | 33.7 | 31.4 | 32.6 | 31.2 |
| 68.6 | 54.9 | 52.9 | 52.9 | 53 | 52.7 | 53.7 | 53.9 | 52.9 | 52.6 | 54.7 | 41.6 | 41.9 | 43.9 | 43.3 | 43.1 | 42.6 | 41.3 | 37 | 39 | 33.1 | 33.4 | 31.9 | 33.1 | 31.7 |
| 68.7 | 56.4 | 54.9 | 53.8 | 55 | 54.4 | 57 | 53.1 | 53.3 | 53.3 | 55.1 | 41.1 | 42.9 | 45.1 | 45.3 | 43.5 | 43.9 | 41.8 | 36.6 | 37.9 | 32.8 | 34 | 30.8 | 32.8 | 32.8 |
| 68 | 56 | 55 | 52.9 | 53.8 | 53.7 | 56 | 53.2 | 53.4 | 53.2 | 56 | 41.5 | 42.4 | 43.7 | 45.5 | 43.4 | 42.8 | 43 | 38.4 | 39.4 | 32.7 | 33.8 | 32 | 33.3 | 33 |
| 66.9 | 55.5 | 55 | 53.4 | 54.1 | 52.7 | 55.8 | 52.9 | 54.2 | 54.2 | 55.5 | 42.5 | 42.1 | 43.3 | 44.4 | 44 | 43.3 | 41 | 36.6 | 39.9 | 33.2 | 33.5 | 32.3 | 34 | 33.3 |
| 66.5 | 54.7 | 54.2 | 53.2 | 53.3 | 52.2 | 54.5 | 50.4 | 53.7 | 53.9 | 54.2 | 42.5 | 42.9 | 43.1 | 44 | 45.1 | 42.6 | 41 | 37 | 39.9 | 33.7 | 34.8 | 32.6 | 33.6 | 33.3 |
| 67.2 | 54.2 | 52.5 | 51.5 | 52.9 | 52.3 | 52.5 | 51.5 | 52 | 52.2 | 53.2 | 42.8 | 43.3 | 44.1 | 44.7 | 43.8 | 43.6 | 40.5 | 37 | 40.4 | 33.2 | 34 | 32 | 33.5 | 33.3 |
| 66.2 | 53.7 | 53.7 | 53.7 | 52.8 | 51.9 | 53.9 | 52.1 | 53.7 | 53.4 | 54.7 | 41.8 | 42.6 | 43.9 | 45.3 | 43.9 | 41.7 | 41.5 | 38 | 40 | 34.1 | 35.8 | 31.1 | 33.2 | 33.1 |
| 66.9 | 55.1 | 54.4 | 53.3 | 53.7 | 52.6 | 54.9 | 52.5 | 55.3 | 55.1 | 55.6 | 41.6 | 41.4 | 42.7 | 43.4 | 42.7 | 42.7 | 41.1 | 38 | 38.9 | 34.7 | 34.4 | 31.9 | 33.4 | 33.4 |
| 68.3 | 54.5 | 54.5 | 53.7 | 54.6 | 54.2 | 55.3 | 53.4 | 54.5 | 55 | 55.5 | 42.2 | 41.7 | 43.9 | 45.7 | 44.7 | 43.1 | 41.6 | 37.2 | 40.1 | 35.4 | 35.6 | 32 | 33 | 33.5 |
| 66.3 | 54.5 | 52.8 | 52.5 | 53.9 | 53.1 | 53.8 | 52.8 | 54 | 54 | 53.5 | 40.4 | 41.3 | 42.7 | 44.9 | 42.5 | 43.2 | 41.4 | 37 | 40.1 | 31.4 | 32.5 | 31.8 | 31.8 | 33 |
| 66.8 | 54.3 | 52.8 | 53 | 53.9 | 51.5 | 53.5 | 54.3 | 52.3 | 52.3 | 53 | 42 | 42.3 | 41.5 | 43.9 | 41 | 41.7 | 42 | 38.2 | 40 | 32.1 | 33.1 | 31.5 | 31.7 | 32.2 |
| 69.8 | 54.9 | 53.9 | 52.4 | 54.2 | 53.9 | 55.7 | 54.4 | 53.4 | 53.4 | 54.4 | 42.5 | 42.4 | 44.6 | 46.5 | 44.2 | 42.1 | 43.3 | 38.4 | 41.4 | 33.1 | 34.2 | 32.2 | 30.9 | 32.2 |
| 69.6 | 56.8 | 55.2 | 53.5 | 55.5 | 53.8 | 54.5 | 51.6 | 50.8 | 50.6 | 52.5 | 41 | 43 | 44.4 | 43.6 | 43.4 | 39.7 | 44.8 | 39 | 39 | 30.8 | 31.6 | 30.3 | 31.8 | 30.2 |
| | 59.4 | 56.7 | 57.9 | 55.5 | 55.9 | 57 | 54.6 | 53.1 | 53.1 | 54.6 | 43.8 | 43.2 | 45.8 | 47 | 46.2 | 43.2 | 44.8 | 38.4 | 41.8 | 32.9 | 34 | 31.8 | 32.8 | 31.8 |
| | | 86.4 | 86.2 | 83.6 | 80.5 | 82.2 | 74 | 69.2 | 69.2 | 69.2 | 46.5 | 47.8 | 48.7 | 51.3 | 47.7 | 48.7 | 44.1 | 40.4 | 43.2 | 33 | 31.3 | 33.4 | 33 | 32.8 |
| | | | 81.6 | 82.7 | 82.9 | 83.4 | 72.9 | 68.6 | 68.6 | 68.9 | 47 | 47.3 | 47.5 | 50.9 | 46.2 | 45.6 | 45 | 38.9 | 42.8 | 34.2 | 32.2 | 33.3 | 31.4 | 33.1 |
| | | | | 80.8 | 78.5 | 76.3 | 72.6 | 66.7 | 66.7 | 65 | 46.8 | 47.3 | 47.2 | 48.7 | 44.7 | 47.7 | 42.5 | 39.2 | 42.3 | 32.2 | 30.6 | 31.5 | 31.6 | 30.9 |
| | | | | | 87 | 79.9 | 72 | 66.7 | 66.7 | 67.2 | 44 | 46.6 | 46.2 | 49.2 | 42.9 | 46.1 | 44.1 | 39.3 | 41.4 | 32.2 | 31.2 | 32.7 | 32.3 | 32.1 |
| | | | | | | 80 | 70.6 | 65.5 | 65.8 | 66.7 | 44.5 | 46.9 | 45.5 | 48.4 | 42.9 | 45.9 | 45.4 | 39.8 | 42.8 | 33.1 | 30.7 | 32.7 | 31.4 | 32.6 |
| | | | | | | | 71.5 | 68.1 | 68.1 | 68.9 | 47.3 | 46.9 | 46.7 | 48.7 | 46.2 | 45.9 | 46.7 | 41.2 | 43.3 | 32.8 | 31.2 | 33.2 | 33.3 | 32.9 |
| | | | | | | | | 63.3 | 63.3 | 65.8 | 45.6 | 44.4 | 44.9 | 46.8 | 42.9 | 44.8 | 45.2 | 38.8 | 42.3 | 33.8 | 30.3 | 30.5 | 31.4 | 32.2 |
| | | | | | | | | | 98.6 | 81.8 | 41.5 | 44 | 42.7 | 43.7 | 41.7 | 43.1 | 44.8 | 35.1 | 38.3 | 35.9 | 32.3 | 33.2 | 31.9 | 34.1 |
| | | | | | | | | | | 81.8 | 41.5 | 43.7 | 42.7 | 43.1 | 41.7 | 43.1 | 44.6 | 34.9 | 38.1 | 35.4 | 32.1 | 32.9 | 31.4 | 33.8 |
| | | | | | | | | | | | 44.3 | 44.4 | 44.2 | 45.2 | 41.9 | 43.8 | 45.8 | 35.6 | 38.6 | 34.6 | 31.8 | 33.9 | 32.7 | 32.5 |
| | | | | | | | | | | | | 58 | 55.8 | 55.9 | 57.6 | 57.9 | 42.4 | 42.6 | 45.1 | 31.6 | 32 | 30.1 | 30 | 29.2 |
| | | | | | | | | | | | | | 56.2 | 58.1 | 54.9 | 57.3 | 40.1 | 38.9 | 43.7 | 29.7 | 29.3 | 27 | 30.4 | 28.1 |
| | | | | | | | | | | | | | | 84.1 | 82.7 | 58.9 | 39.8 | 45.5 | 47.2 | 30.5 | 31.3 | 28.9 | 29.8 | 30.8 |
| | | | | | | | | | | | | | | | 79.5 | 60.9 | 42.3 | 42 | 48 | 32.1 | 32.3 | 31.5 | 32.5 | 34 |
| | | | | | | | | | | | | | | | | 58.7 | 40 | 43.5 | 47.9 | 30.5 | 33.4 | 29.7 | 30.5 | 31.6 |
| | | | | | | | | | | | | | | | | | 36.2 | 41.8 | 43.9 | 30.4 | 31.4 | 29.8 | 31.2 | 31.7 |
| | | | | | | | | | | | | | | | | | | 38.2 | 40.3 | 29.7 | 29.9 | 29.8 | 30.6 | 30.1 |
| | | | | | | | | | | | | | | | | | | | 67.8 | 26 | 28.2 | 26.6 | 26 | 26.2 |
| | | | | | | | | | | | | | | | | | | | | 28.6 | 29.3 | 27.6 | 27.2 | 28.9 |
| | | | | | | | | | | | | | | | | | | | | | 81.6 | 72.7 | 62.1 | 61.6 |
| | | | | | | | | | | | | | | | | | | | | | | 67.6 | 58.2 | 56.9 |
| | | | | | | | | | | | | | | | | | | | | | | | 60.6 | 61 |
| | | | | | | | | | | | | | | | | | | | | | | | | 80.7 |

| 58 | 59 | 60 | 61 | 62 | 63 | 64 | 65 | 66 | 67 | 68 | 69 | 70 | 71 | 72 |
|---|---|---|---|---|---|---|---|---|---|---|---|---|---|---|
| 29 | 27.9 | 28.4 | 30.1 | 31.8 | 31.8 | 31.8 | 32 | 31.4 | 28.3 | 30.7 | 22.6 | 23.4 | 23.8 | 24.7 |
| 28.9 | 27.8 | 28.5 | 30.5 | 32.7 | 32.7 | 32.7 | 32.2 | 31.9 | 28.5 | 29.9 | 23.2 | 24.1 | 23.6 | 26 |
| 28 | 27.8 | 28.8 | 30.6 | 33.3 | 33.3 | 33.3 | 33 | 31.3 | 28.3 | 29.7 | 22.8 | 23.8 | 24.1 | 25.3 |
| 29.8 | 28.9 | 29.6 | 31.9 | 32.4 | 32.4 | 32.1 | 32.1 | 31.3 | 29.1 | 30 | 23.2 | 23.5 | 23.6 | 25.1 |
| 27.3 | 25.3 | 25.8 | 29.5 | 29.5 | 29.5 | 29.5 | 30.2 | 28.5 | 28.2 | 28.7 | 24.2 | 22.6 | 24.5 | 23.6 |
| 27.7 | 25.8 | 26.3 | 30.5 | 29.8 | 29.6 | 29.6 | 30.3 | 28.8 | 28.3 | 29.7 | 24.3 | 23.6 | 24.9 | 23.1 |
| 26.6 | 26.4 | 26.2 | 28.9 | 30.8 | 30.5 | 30.5 | 30.5 | 30 | 28.7 | 30.4 | 24.1 | 24.6 | 24 | 25.8 |
| 27.1 | 25.8 | 26.3 | 30.6 | 33.3 | 33 | 33.3 | 33 | 31.6 | 28.8 | 29.5 | 23.5 | 24.8 | 23.8 | 26.1 |
| 23.7 | 22.5 | 22.8 | 28.4 | 30 | 30 | 30 | 29.8 | 28.4 | 25.9 | 26.9 | 18.7 | 20.3 | 19 | 19.9 |
| 28.2 | 26.4 | 27.1 | 30.3 | 32 | 31.7 | 32 | 31.5 | 28.8 | 28.3 | 29.7 | 23.6 | 24.6 | 23.9 | 23.8 |
| 26.5 | 26.8 | 26.8 | 29.5 | 32.4 | 32.2 | 32.4 | 32.4 | 28.5 | 29.2 | 28.6 | 22.7 | 23.6 | 24.5 | 26.7 |
| 26.2 | 26.3 | 27 | 30.8 | 32 | 31.7 | 31.7 | 31.5 | 27.9 | 27.1 | 28.8 | 23.6 | 22.8 | 23.6 | 24.4 |
| 26.2 | 25.6 | 25.4 | 29.2 | 30.8 | 30.5 | 30.5 | 30.3 | 27.7 | 26.5 | 27.6 | 24.5 | 23.4 | 23.8 | 25.3 |
| 29.9 | 30 | 30.7 | 32.8 | 32.8 | 32.8 | 32.8 | 33 | 30.9 | 30.7 | 32.4 | 23.5 | 24.9 | 23.9 | 25.6 |
| 32.1 | 30 | 28.9 | 31.7 | 32.2 | 32.2 | 32.2 | 32.5 | 31.2 | 29.5 | 31.2 | 23.2 | 24.2 | 24.9 | 26 |
| 31.2 | 29.7 | 30 | 31.8 | 33.9 | 33.9 | 33.7 | 33.9 | 28.2 | 30.6 | 29.9 | 25.7 | 25.4 | 24.5 | 27.3 |
| 32.8 | 34.1 | 33 | 35.9 | 33.8 | 33.8 | 33.5 | 34.1 | 30.9 | 30.7 | 34 | 25 | 26.1 | 25.9 | 24.6 |
| 33.9 | 34.3 | 34.1 | 36 | 35.8 | 35.8 | 35.5 | 35.8 | 33.1 | 32.3 | 34 | 25.5 | 26.9 | 25.6 | 24.2 |
| 32.2 | 32.8 | 31.9 | 33.9 | 30.8 | 30.8 | 30.8 | 30.6 | 31.8 | 29.4 | 31.6 | 27.4 | 28.9 | 26.3 | 27.7 |
| 32.7 | 32.8 | 31.4 | 34.4 | 31.3 | 31.3 | 31.3 | 31.1 | 32 | 29.9 | 32.6 | 27.6 | 28.4 | 26.3 | 25.8 |
| 31.4 | 31.8 | 31.3 | 34 | 32.7 | 32.7 | 32.7 | 32.7 | 32.7 | 31.3 | 34.5 | 24.1 | 25.7 | 25.4 | 27.7 |
| 32.5 | 32.7 | 32.4 | 33.4 | 32.6 | 32.6 | 32.6 | 32.3 | 32.3 | 28.9 | 32.9 | 26.2 | 26.3 | 27.3 | 25.9 |
| 32.3 | 33.9 | 33.2 | 33.8 | 31.6 | 31.6 | 31.6 | 31.9 | 33.1 | 29.9 | 33.2 | 28.1 | 26.7 | 29 | 25.9 |
| 31.6 | 33.3 | 32.5 | 33.8 | 31.5 | 31.5 | 31.5 | 31.2 | 33.2 | 30 | 32.5 | 25.8 | 26.1 | 27.6 | 25.7 |
| 32.8 | 32.9 | 32.7 | 33.5 | 31.2 | 31.2 | 31.2 | 31.4 | 32.1 | 29.5 | 31.4 | 26.5 | 26 | 25.9 | 27 |
| 32.4 | 33.5 | 32.8 | 33.4 | 32.6 | 32.3 | 32.3 | 31.6 | 31.7 | 31.3 | 34.1 | 26.7 | 27.3 | 26.9 | 26.8 |
| 32.7 | 33.5 | 32.8 | 34.2 | 32.2 | 32 | 32 | 31.7 | 32 | 30.8 | 33.3 | 27.4 | 28.7 | 26.9 | 26.2 |
| 33.5 | 33.1 | 32.2 | 35.3 | 33.1 | 33.1 | 33.1 | 32.3 | 31.3 | 31.4 | 33.4 | 26.2 | 27.1 | 27.6 | 26.3 |
| 34 | 33.2 | 32.2 | 33.7 | 31.4 | 31.4 | 31.4 | 31.1 | 32.1 | 30.6 | 32.7 | 25.5 | 26.1 | 26.4 | 28.4 |
| 32.9 | 32.4 | 31.1 | 32.4 | 30.6 | 30.6 | 30.6 | 30.3 | 31.8 | 30.3 | 32.3 | 25.3 | 27.3 | 26.8 | 27.1 |
| 32.9 | 32.8 | 32.1 | 35.1 | 31.8 | 31.8 | 31.8 | 31.8 | 30.7 | 29.1 | 31.6 | 26.9 | 27.3 | 27.4 | 27.8 |
| 29.8 | 29.8 | 29.3 | 31.4 | 30.8 | 30.5 | 30.5 | 30 | 29.8 | 30.6 | 32 | 26.7 | 26.3 | 24.6 | 28.5 |
| 32.6 | 33.4 | 32.7 | 36 | 33.6 | 33.6 | 33.6 | 33.3 | 33.1 | 31.1 | 32.4 | 25.3 | 25.8 | 25.2 | 27.5 |
| 34.3 | 32.2 | 32 | 38.4 | 34.1 | 33.8 | 34.1 | 34.3 | 31.8 | 34.2 | 33.1 | 23.8 | 25.8 | 25.1 | 25.6 |
| 34 | 32.7 | 32.4 | 37.7 | 33.6 | 33.3 | 33.6 | 33.6 | 33 | 33.4 | 34.7 | 23.7 | 25.8 | 23.9 | 23.6 |
| 32.5 | 31.8 | 31.8 | 35.9 | 33.2 | 33 | 33.2 | 33.5 | 32.3 | 33.9 | 34.7 | 25.9 | 27.4 | 25.4 | 26.4 |
| 33.3 | 31.3 | 32.5 | 37.4 | 33.1 | 32.8 | 33.1 | 33.9 | 32.7 | 33.4 | 34.2 | 23.4 | 24.8 | 24.6 | 26.1 |
| 33.9 | 32.6 | 32.6 | 36.6 | 33.6 | 33.3 | 33.6 | 34.4 | 33 | 32.9 | 34.2 | 24.5 | 25.5 | 24.9 | 25.6 |
| 34.5 | 32.7 | 33.7 | 38.7 | 34.2 | 33.9 | 34.2 | 34.4 | 33.2 | 32.3 | 35 | 23.3 | 25.6 | 24.9 | 25.3 |
| 32.2 | 31.4 | 32 | 36.4 | 32.7 | 32.4 | 32.7 | 32.4 | 32.3 | 32.2 | 33.1 | 26.3 | 26.8 | 26.5 | 25.4 |
| 34.1 | 32.5 | 33.3 | 37.9 | 34.3 | 34.3 | 34.3 | 34.1 | 32.3 | 32.2 | 32.1 | 26.8 | 27 | 27.7 | 25.5 |
| 33.8 | 32 | 32.8 | 37.9 | 34.1 | 34.1 | 34.1 | 33.8 | 32.3 | 32 | 31.8 | 26.8 | 27.3 | 27.5 | 25.8 |
| 31.9 | 31.8 | 31.3 | 37.2 | 35.4 | 35.2 | 35.4 | 35.7 | 32.8 | 31.2 | 31.4 | 26 | 27.2 | 27.2 | 26.5 |
| 30.1 | 31.2 | 30 | 32 | 33.6 | 33.6 | 33.6 | 33.3 | 31.4 | 34.3 | 33.3 | 23.9 | 25.4 | 23.3 | 25.7 |
| 29.1 | 29.2 | 28.3 | 29.3 | 29.9 | 29.9 | 29.9 | 29.9 | 29.6 | 32.5 | 30.4 | 22.8 | 23.8 | 23.1 | 25.9 |
| 30.4 | 30.8 | 31 | 33.3 | 34 | 34 | 34 | 33.3 | 29.3 | 34.3 | 33.5 | 24 | 24.8 | 26.4 | 27.2 |
| 32.6 | 33.2 | 33 | 35.4 | 35.3 | 35.3 | 35.3 | 34 | 30.1 | 35.6 | 34.8 | 22.7 | 23.4 | 24.1 | 25.6 |
| 30.4 | 31.8 | 32.3 | 33.4 | 33.8 | 33.8 | 33.8 | 33.3 | 30.3 | 34.6 | 32 | 22.1 | 24.3 | 23.9 | 25.9 |
| 30.8 | 31.4 | 30.9 | 34.3 | 34.4 | 34.4 | 34.4 | 34.2 | 31.8 | 35.7 | 33.8 | 23.9 | 24.6 | 23.1 | 26.8 |
| 30.6 | 29.2 | 30 | 30 | 30.8 | 30.8 | 30.8 | 31.5 | 31.3 | 31.1 | 30.8 | 27.1 | 25.6 | 25.7 | 24.4 |
| 24 | 25.1 | 24.4 | 27.9 | 28.7 | 28.7 | 28.9 | 28.9 | 28.6 | 27.7 | 27.6 | 22.5 | 21.7 | 21.2 | 22.7 |
| 26.2 | 26.9 | 27.1 | 31.1 | 30.1 | 30.1 | 30.1 | 30.6 | 28.4 | 30 | 27.8 | 22.7 | 22.7 | 24.3 | 22.6 |
| 59.7 | 60.1 | 62.3 | 55.6 | 47 | 47 | 47 | 46.4 | 47.4 | 48.4 | 45.9 | 27.8 | 29.9 | 28.4 | 26.9 |
| 56.6 | 56.5 | 58.3 | 51.1 | 44.3 | 44.3 | 44.3 | 43.8 | 45.5 | 47.3 | 44.4 | 26.7 | 28.7 | 27.5 | 29.2 |
| 58 | 57.5 | 59.4 | 55.2 | 47.3 | 47.3 | 47.3 | 46.7 | 46.7 | 48 | 43.6 | 27.6 | 29.9 | 28.3 | 27.3 |
| 68.3 | 69.8 | 71.2 | 55.7 | 45.2 | 45.2 | 45.2 | 44.7 | 46.2 | 50.1 | 46.5 | 26 | 28.7 | 25.3 | 29.2 |
| 72 | 71.6 | 73 | 59.6 | 46.6 | 46.6 | 46.6 | 46.3 | 47.1 | 50.1 | 48.1 | 28.4 | 30 | 28 | 29.3 |

| | | | | | | | | | | | | | |
|---|---|---|---|---|---|---|---|---|---|---|---|---|---|
| 78.8 | 82.4 | 56.7 | 47.1 | 47.1 | 47.1 | 47.1 | 43.8 | 49.3 | 45.8 | 29.9 | 31.8 | 29.9 | 29.8 |

| | | | | | | | | | | | | |
|---|---|---|---|---|---|---|---|---|---|---|---|---|
| 88.1 | 53.9 | 47 | 47 | 47 | 46.2 | 43.4 | 48.3 | 46.8 | 29.9 | 32.9 | 29.9 | 29.5 |

| | | | | | | | | | | | |
|---|---|---|---|---|---|---|---|---|---|---|---|
| 55.5 | 47.3 | 47.3 | 47.3 | 47.3 | 42.3 | 48.3 | 47.1 | 28.7 | 31.4 | 29.1 | 30 |

| | | | | | | | | | | |
|---|---|---|---|---|---|---|---|---|---|---|
| 52.2 | 52.2 | 52.2 | 51.6 | 51.2 | 51.1 | 47.7 | 27.4 | 29.3 | 27.4 | 27.8 |

| | | | | | | | | | |
|---|---|---|---|---|---|---|---|---|---|
| 99.7 | 99.2 | 94.1 | 59.5 | 52 | 51.8 | 28.4 | 30.7 | 29.2 | 29.5 |

| | | | | | | | | |
|---|---|---|---|---|---|---|---|---|
| 99.2 | 94.4 | 59.5 | 52 | 51.8 | 28.4 | 30.7 | 29.2 | 29.5 |

| | | | | | | | |
|---|---|---|---|---|---|---|---|
| 94.1 | 60.1 | 52 | 51.5 | 28.2 | 30.5 | 29.2 | 29.3 |

| | | | | | | |
|---|---|---|---|---|---|---|
| 59.5 | 52 | 50.9 | 28.4 | 31.9 | 29 | 28.8 |

| | | | | | |
|---|---|---|---|---|---|
| 52.4 | 47.3 | 26.8 | 29.6 | 29.5 | 28.1 |

| | | | | |
|---|---|---|---|---|
| 55.6 | 25 | 28.3 | 26.4 | 32 |

| | | | |
|---|---|---|---|
| 28.5 | 31.1 | 29.7 | 30.5 |

| | | |
|---|---|---|
| 84 | 62 | 52 |

| | |
|---|---|
| 60.2 | 52.5 |

53.7

[0674] A MATGAT table for local alignment of a specific domain, or data on % identity/similarity between specific domains may also be included.

### 4. AS-MTT (Abiotic Stress Membrane Tethered Transcription Factor) Polypeptides

[0675] Results of the MATGAT analysis are shown in Table B4

TABLE B4

| | | 1 | 2 | 3 | 4 | 5 | 6 | 7 | 12 | 13 | 14 |
|---|---|---|---|---|---|---|---|---|---|---|---|
| 1. | A. comosus_DT336453#1 | | 72 | 74 | 86 | 86 | 70 | 70 | 67 | 65 | 65 |
| 2. | S. tuberosum_TC170010#1 | | | 84 | 67 | 67 | 72 | 72 | 81 | 74 | 77 |
| 3. | I. nil_TC6724#1 | | | | 70 | 70 | 74 | 74 | 84 | 74 | 77 |
| 4. | T. aestivum_TC297361#1 | | | | | 100 | 72 | 70 | 63 | 63 | 63 |
| 5. | H. vulgare_TC157185#1 | | | | | | 72 | 70 | 63 | 63 | 63 |
| 6. | S. officinarum_TC86637#1 | | | | | | | 98 | 72 | 67 | 70 |
| 7. | O. sativa_LOC_Os05g08980.1#1 | | | | | | | | 72 | 67 | 70 |
| 12. | H. annuus_TC32349#1 | | | | | | | | | 77 | 79 |
| 13. | P. trichocarpa_657115#1 | | | | | | | | | | 98 |

### 5. EXO-1 Polypeptide

[0676] Results of the software analysis are shown in Table B5 for the global similarity over the full length of the polypeptide sequences. The sequence similarity (in %) between the EXO-1 polypeptide sequences useful in performing the methods of the invention can be as low as 20% compared to SEQ ID NO: 763.

TABLE B5
MatGAT results for global similarity and identity over the full length of the polypeptide sequences.

| | | 1 | 2 | 3 | 4 | 5 | 6 | 7 | 8 | 9 | 10 | 11 | 12 | 13 | 14 |
|---|---|---|---|---|---|---|---|---|---|---|---|---|---|---|---|
| 39. | A. thaliana_AT1G18090.1_III | 30.3 | 47.5 | 23.4 | 30.6 | 23.5 | 24.8 | 25.3 | 24.6 | 28.3 | 51.4 | 22.5 | 22.1 | 27.9 | 25.8 |
| 40. | A. thaliana_AT1G29630.2_III | 41.8 | 27.5 | 28 | 44.1 | 22 | 42.5 | 27.3 | 26.9 | 53.4 | 28 | 18.8 | 23.9 | 29.7 | 22.3 |
| 41. | C. vulgaris_30308_ | 35.6 | 24.3 | 17.6 | 29.2 | 47 | 21.5 | 50.4 | 47.6 | 23 | 25.5 | 26.8 | 19.3 | 41.9 | 56.3 |
| 42. | Chlorella_24009_ | 32 | 24.5 | 16.6 | 26.6 | 47.1 | 19.9 | 45.2 | 41.6 | 22.1 | 25 | 27.9 | 18.5 | 39.9 | 51.9 |
| 43. | D. melanogaster_tos-PA_III | 23.9 | 24.2 | 30.4 | 26.5 | 16.1 | 23.6 | 17.8 | 17.6 | 25.9 | 23.4 | 19.6 | 23.4 | 20.8 | 16.9 |
| 44. | G. max_Glyma05g29660.1_ | | 29.7 | 22.1 | 54.9 | 30.4 | 34.4 | 40 | 39.2 | 42 | 31.3 | 25.2 | 22.8 | 43 | 32.2 |
| 45. | G. max_Glyma07g11320.1_ | | | 22.3 | 31.7 | 23.1 | 24 | 25 | 25.7 | 27.8 | 56.4 | 22.6 | 23.2 | 29.7 | 25.4 |
| 46. | H. sapiens_NM_130398.2_ | | | | 25.9 | 17.6 | 26.4 | 16.2 | 15.2 | 25.6 | 23.6 | 19.1 | 23.8 | 18.4 | 18.1 |
| 47. | M. truncatula_AC153460_23.4_ | | | | | 25.7 | 38.1 | 34.1 | 33.3 | 47.7 | 30.1 | 21.4 | 26.3 | 35.6 | 27.6 |
| 48. | O. lucimarinus_13915_ | | | | | | 19.7 | 47.3 | 42.7 | 20.9 | 23.4 | 26.7 | 18.2 | 39.3 | 43.5 |
| 49. | O. sativa_LOC_Os01g56940.1_III | | | | | | | 23.7 | 23.7 | 43.9 | 23.1 | 17.5 | 24.3 | 25.5 | 20.1 |
| 50. | P. patens_114516_ | | | | | | | | 76.5 | 27.2 | 25.9 | 23.7 | 17.4 | 48.9 | 43.6 |
| 51. | P. patens_194153_ | | | | | | | | | 26.9 | 24.9 | 24 | 17.2 | 48.6 | 43 |
| 52. | P. trichocarpa_scaff_XI.493_III | | | | | | | | | | 26.8 | 18.9 | 25.6 | 30 | 21.8 |
| 53. | P. trichocarpa_scaff_XV.367_ | | | | | | | | | | | 24.1 | 23.2 | 28.5 | 25.4 |
| 54. | S. cerevisiae_YDR263C_ | | | | | | | | | | | | 33 | 26.3 | 25.3 |
| 55. | S. cerevisiae_YOR033C_ | | | | | | | | | | | | | 20.6 | 17.8 |
| 56. | S. moellendorffii_175620_ | | | | | | | | | | | | | | 40.1 |
| 57. | V. carteri_61592_ | | | | | | | | | | | | | | |

### 6. YiAP2 Polypeptides

[0677] Results of the software analysis are shown in Table B6 for the global similarity and identity over the full length of the polypeptide sequences. The sequence identity (in %) between the YiAP2 polypeptide sequence of SEQ ID NO: 836 and other YiAP2 polypeptides of Table B6 are 66.9%, 77%, 58.4%, 57.9%, 67.1%, and 84%.

TABLE B6
MatGAT results for global similarity and identity over the full length of the polypeptide sequences.

| Polypeptide Nr. | Name | 1 | 2 | 3 | 4 | 5 | 6 | 7 | 8 | 9 | 10 |
|---|---|---|---|---|---|---|---|---|---|---|---|
| 1 | A. thaliana_AT1G16060.1#1 | | 57.7 | 51 | 49.9 | 50.7 | 60.7 | 52.1 | 51.5 | 51.2 | 58 |
| 2 | Aquilegia_sp_TC20979#1 | 74.1 | | 53.7 | 51.7 | 53.8 | 61.8 | 64.2 | 61.7 | 61.5 | 61.4 |
| 3 | C. clementina_DY288437#1 | 58.6 | 58.3 | | 77 | 77.5 | 61.7 | 54.1 | 53.8 | 53.5 | 55.8 |
| 4 | C. sinensis_EY655317#1 | 58 | 58.6 | 78.4 | | 63.3 | 59.3 | 53.7 | 51.5 | 51.3 | 54.7 |
| 5 | G. hirsutum_TC125414#1 | 58 | 60.9 | 86.6 | 72 | | 58.6 | 52.1 | 52.6 | 52.4 | 55.3 |
| 6 | G. max_Glyma07g02380.1#1 | 70.7 | 70.7 | 68.6 | 69.3 | 67.9 | | 60.4 | 58.4 | 58.1 | 63.1 |
| 7 | G. max_Glyma17g07860.1#1 | 66.9 | 79.1 | 58 | 60.3 | 58.3 | 68 | | 70.1 | 69.8 | 57.3 |
| 8 | M. truncatula_AC126784_15#1 | 66.9 | 77 | 58.4 | 57.9 | 57.9 | 67.1 | 84 | | 99.7 | 57.7 |
| 9 | Medtr_AP2 | 66.9 | 77 | 58.4 | 57.9 | 57.9 | 67.1 | 84 | 100 | | 57.4 |
| 10 | O. basilicum_TA1087_39350#1 | 71 | 74.1 | 62.5 | 63.1 | 62.2 | 73.8 | 71.1 | 69.7 | 69.7 | |
| 11 | O. sativa_LOC_Os08g34360.1#1 | 57.8 | 61.6 | 47.7 | 48 | 46.1 | 56.6 | 60.4 | 61.1 | 61.1 | 59.4 |
| 12 | O. sativa_LOC_Os09g25600.1#1 | 66.8 | 69.7 | 53.3 | 54.9 | 53 | 63.9 | 67 | 66.2 | 66.2 | 66.2 |
| 13 | P. trichocarpa_800184#1 | 65.8 | 71.3 | 72.7 | 72.7 | 73.1 | 81.5 | 69.1 | 65.4 | 65.4 | 72.6 |
| 14 | R. communis_EG658396#1 | 60.3 | 61.8 | 86.3 | 74.6 | 88 | 72.5 | 59.7 | 59.6 | 59.6 | 65.8 |
| 15 | S. bicolor_Sb02g025080.1#1 | 63.1 | 65.6 | 50.3 | 50.8 | 52 | 59 | 63.6 | 62.1 | 62.1 | 61.6 |
| 16 | S. luberosum_TC187592#1 | 71 | 78.2 | 58 | 58.8 | 58.3 | 66.3 | 76.2 | 74.6 | 74.6 | 72.7 |
| 17 | Triphysaria_sp_TC12598#1 | 71 | 72.7 | 56.3 | 58.6 | 55.8 | 67.9 | 72.1 | 71.9 | 71.9 | 73.5 |
| 18 | V. vinifera_GSVIVT00017130001#1 | 73.1 | 85.1 | 59.7 | 59.7 | 60.6 | 68 | 81.1 | 78.1 | 78.1 | 75.1 |
| 19 | Z. mays_TC386652#1 | 63.1 | 66.9 | 50.3 | 51.8 | 52.3 | 59.3 | 63.6 | 64.4 | 64.4 | 62.9 |

| Polypeptide Nr. | Name | 11 | 12 | 13 | 14 | 15 | 16 | 17 | 18 | 19 |
|---|---|---|---|---|---|---|---|---|---|---|
| 1 | A. thaliana_AT1G16060.1#1 | 47.8 | 54.7 | 57.6 | 53.3 | 48.7 | 59.1 | 56.8 | 57 | 51.7 |
| 2 | Aquilegia_sp_TC20979#1 | 49.9 | 58.2 | 63.4 | 56.1 | 55.9 | 67.7 | 59.9 | 74.1 | 56.4 |
| 3 | C. clementina_DY288437#1 | 41.1 | 49.5 | 65.8 | 81.7 | 46.2 | 52.8 | 50.7 | 55.1 | 46.8 |
| 4 | C. sinensis_EY655317#1 | 40.8 | 48.4 | 64 | 67.7 | 45.7 | 51.1 | 50.4 | 54 | 46.3 |
| 5 | G. hirsutum_TC125414#1 | 40.6 | 47.8 | 64.8 | 80.2 | 47.2 | 54.3 | 48.5 | 56.9 | 47.1 |
| 6 | G. max_Glyma07g02380.1#1 | 49.2 | 55.9 | 73.4 | 63.6 | 51.8 | 59.9 | 58.8 | 61.5 | 52.5 |
| 7 | G. max_Glyma17g07860.1#1 | 48.5 | 56.3 | 59.2 | 54.1 | 51.5 | 60.4 | 56.8 | 68.3 | 53.5 |
| 8 | M. truncatula_AC126784_15#1 | 48 | 56.2 | 56.3 | 54 | 52.6 | 57.9 | 55.1 | 65.4 | 53.6 |
| 9 | Medtr_AP2 | 47.8 | 55.9 | 56 | 53.8 | 52.3 | 57.6 | 54.9 | 65.1 | 53.3 |
| 10 | O. basilicum_TA1087_39350#1 | 47.1 | 55.3 | 62.5 | 57.8 | 51.3 | 62.6 | 61 | 63.1 | 52.3 |
| 11 | O. saliva_LOC_Os08g34360.1#1 | | 57.5 | 46.5 | 41.8 | 56.2 | 51.8 | 50 | 49.9 | 57.2 |
| 12 | O. sativa_LOC_Os09g25600.1#1 | 69.5 | | 56.2 | 51.6 | 74.4 | 59.6 | 57.4 | 60 | 76.7 |
| 13 | P. trichocarpa_800184#1 | 55.4 | 62.5 | | 68.2 | 51.9 | 63.5 | 56.8 | 64.2 | 52.5 |
| 14 | R. communis_EG658396#1 | 50.1 | 55.4 | 75.3 | | 47.4 | 55.2 | 52.5 | 58.2 | 48 |
| 15 | S. bicolor_Sb02g025080.1#1 | 70.6 | 80.9 | 57.8 | 52.3 | | 55.7 | 53.6 | 55.8 | 81.1 |
| 16 | S. luberosum_TC187592#1 | 62.5 | 70.2 | 69.1 | 60.5 | 67.1 | | 60.6 | 66.3 | 56.3 |
| 17 | Triphysaria_sp_TC12598#1 | 60.6 | 68.6 | 63.9 | 59.2 | 64.3 | 75.4 | | 63.6 | 55.6 |
| 18 | V. vinifera_GSVIVT00017130001#1 | 61.3 | 70.7 | 71.1 | 62.6 | 65.1 | 78.7 | 76.1 | | 58.4 |
| 19 | Z. mays_TC386652#1 | 72.6 | 82.3 | 59.6 | 51.8 | 87.4 | 69.2 | 66.4 | 68.2 | |

### Example 4

### Identification of Domains Comprised in Polypeptide Sequences Useful in Performing the Methods of the Invention

[0678] The Integrated Resource of Protein Families, Domains and Sites (InterPro) database is an integrated interface for the commonly used signature databases for text- and sequence-based searches. The InterPro database combines these databases, which use different methodologies and varying degrees of biological information about well-characterized proteins to derive protein signatures. Collaborating databases include SWISS-PROT, PROSITE, TrEMBL, PRINTS, ProDom and Pfam, Smart and TIGRFAMs. Pfam is a large collection of multiple sequence alignments and hidden Markov models covering many common protein domains and families. Pfam is hosted at the Sanger Institute server in the United Kingdom. Interpro is hosted at the European Bioinformatics Institute in the United Kingdom.

### 1. FSM1-Like (Fruit Sant/Myb) Polypeptides

[0679] The results of the InterPro scan of the polypeptide sequence as represented by SEQ ID NO: 2 are presented in Table C1.

TABLE C1
InterPro scan results (major accession numbers) of the polypeptide sequence
as represented by SEQ ID NO: 2.

| Method | AccNumber | ShortName | Score | Location |
|---|---|---|---|---|
| INTERPRO | IPR001005 | SANT, DNA-binding | | |
| SMART | SM00717 | SANT | 7.5E−9 | [10-62]T |
| PROFILE | PS50090 | MYB_3 | 0.0 | [6-60]T |
| INTERPRO | IPR009057 | Homeodomain-like | | |
| SUPERFAMILY | SSF46689 | Homeodomain_like | 7.0E−13 | [13-67]T |
| INTERPRO | IPR014778 | Myb, DNA-binding | | |
| PFAM | PF00249 | Myb_DNA-binding | 4.8E−4 | [11-60]T |
| INTERPRO | IPR015609 | Molecular chaperone, | | |
| | | heat shock protein, Hsp40, DnaJ | | |
| PANTHER | PTHR11821 | Hsp40/DnaJ_Rel | 9.0E−8 | [13-59]T |
| INTERPRO | noIPR | unintegrated | | |
| PANTHER | PTHR11821: SF29 | PTHR11821: SF29 | 9.0E−8 | [13-59]T |

### 2. PIF3-Like (Phytochrome Interacting Factor 3) Polypeptides

[0680] The results of the InterPro scan of the polypeptide sequence as represented by SEQ ID NO: 293 are presented in Table C2.

TABLE C2
InterPro scan results (major accession numbers) of the polypeptide sequence
as represented by SEQ ID NO: 293.

| | | | Amino acid |
|---|---|---|---|
| | | | coordinates |
| Database | Accession number | Accession name | on SEQ ID NO 2 |
| InterPro | IPR001092 | Basic helix-loop-helix | |
| | | dimerisation region bHLH | |
| HMMPfam | PF00010 | HLH | T[270-319] 7.6e−17 |
| HMMSmart | SM00353 | no description | T[275-324] 4.1e−19 |
| ProfileScan | PS50888 | HLH | T[266-319] 16.780 |
| InterPro | IPR011598 | Helix-loop-helix DNA-binding | |
| Gene3D | G3DSA: 4.10.280.10 | no description | T[266-324] 2.5e−08 |
| Superfamily | SSF47459 | HLH, helix-loop-helix DNA- | T[267-351] 3.2e−19 |
| | | binding domain | |
| InterPro | NULL | NULL | |
| HMMPanther | PTHR12565 | STEROL REGULATORY | T[278-318] 2.2e−09 |
| | | ELEMENT-BINDING PROTEIN | |
| HMMPanther | PTHR12565: SF7 | CENTROMERE-BINDING | T[278-318] 2.2e−09 |
| | | PROTEIN 1, CBP-1 | |
| InterPro | IPR001092 | Basic helix-loop-helix | |
| | | dimerisation region bHLH | |

### 3. UROD (Uroporphyrinogen III Decarboxylase) Polypeptide

[0681] The results of the InterPro scan of the polypeptide sequence as represented by SEQ ID NO: 368 are presented in Table C3.

TABLE C3
InterPro scan results (major accession numbers) of the polypeptide
sequence as represented by SEQ ID NO: 368.

| | | Domain ID and | Short | |
|---|---|---|---|---|
| Method | | name | Name | Location |
| Interpro | IPR000257 | Uroporphyrinogen | URO-D | 4.8e−146 |
| | | decarboxylase | | [50-390]T |
| PFAM | PF01208 | Uroporphyrinogen | UROD_1 | NA [68-77]? |
| | | decarboxylase | | |
| PROSITE | PS00907 | Uroporphyrinogen | UROD_2 | 8e−5 |
| | | decarboxylase | | [187-203]T |
| Interpro | IPR006361 | Uroporphyrinogen | | |
| | | decarboxylase | | |
| | | HemE | | |
| PANTHER | PTHR21091: | Uroporphyrinogen | | 1e−127 |
| | SF2 | decarboxylase | | [65-390]T |
| TIGRFAMs | TIGR01464 | hemE: | | 3.6e−187 |
| | | uroporphyrinogen | | [54-389]T |
| | | decarboxylase | | |

### 4. AS-MTT (Abiotic Stress Membrane Tethered Transcription Factor) Polypeptides

[0682] The results of the InterPro scan of the polypeptide sequence as represented by SEQ ID NO: 537 are presented in Table C4.

TABLE C4
InterPro scan results (major accession numbers) of the polypeptide
sequence as represented by SEQ ID NO: 537.

| | | | | Location |
|---|---|---|---|---|
| | Domain | | Short | (Amino acid |
| Interpro ID | ID | Domain name | Name | coordinates) |
| IPRO12458 | PF07889 | Protein of unknown | DUF | 94-216 |
| | | function DUF1664 | 1664 | |
| Unintegrated | SIGNALP | Signal-peptide | SignalP | 1-23 |
| | TMHMM | TRANSMEMBRANE- | | 5-25 and |
| | | REGIONS | | 95-115 |

### 5. EXO-1 Polypeptide

[0683] The results of the InterPro scan of the polypeptide sequence as represented by SEQ ID NO: 763 are presented in Table C5.

TABLE C5
InterPro scan results (major accession numbers) of the polypeptide sequence
as represented by SEQ ID NO: 763.

| | | | Amino acid coordinates |
|---|---|---|---|
| Database | Accession number | Accession name | on SEQ ID NO: 763 |
| HMMPfam | PF00752 | XPG_N | 1-99 |
| HMMPfam | PF00867 | XPG_I | 138-230 |
| HMMPanther | PTHR11081: SF8 | EXONUCLEASE 1 | 17-333 |
| HMMPanther | PTHR11081 | XP-G/RAD2 DNA REPAIR | 17-333 |
| | | ENDONUCLEASE FAMILY | |
| superfamily | SSF88723 | PIN domain-like | 2-226 |
| ScanRegExp | PS00841 | XPG_1 | 71-85 |
| FPrintScan | PR00853 | XPGRADSUPER | 24-38 |
| FPrintScan | PR00853 | XPGRADSUPER | 73-92 |
| FPrintScan | PR00853 | XPGRADSUPER | 137-154 |
| FPrintScan | PR00853 | XPGRADSUPER | 158 178 |
| FPrintScan | PR00853 | XPGRADSUPER | 216 231 |
| HMMSmart | SM00485 | XPGN | 1 99 |
| HMMSmart | SM00484 | XPGI | 138 208 |
| HMMSmart | SM00279 | HhH2 | 213 246 |
| Gene3D | G3DSA: 3.40.50.1010 | no description | 16 195 |

### 6. YiAP2 Polypeptides

[0684] The results of the InterPro scan of the polypeptide sequence as represented by SEQ ID NO: 836 are presented in Table C6.

TABLE C6
InterPro scan results (major accession numbers) of the
polypeptide sequence as represented by SEQ ID NO: 836.

| | | | | Amino |
|---|---|---|---|---|
| | | | | Acid |
| | | Accession | | Coor- |
| InterPro | Database | nr | Name | dinates |
| IPR001471 | PRINTS | PR00367 | ETHRSPELEMNT | [51-62] |
| | | | | and |
| | | | | [189-209] |
| Domain | GENE3D | G3DSA: | no description | [49-116] |
| | | 3.30.730.10 | | and |
| | | | | [148-210] |
| Patho- | PFAM | PF00847 | AP2 | [49-106] |
| genesis- | | | | and |
| related | | | | [148-200] |
| tran- | | | | |
| scriptional | | | | |
| factor/ERF, | | | | |
| DNA- | | | | |
| binding | | | | |
| | SMART | SM00380 | AP2 | [50-119] |
| | | | | and |
| | | | | [149-213] |
| | PROFILE | PS51032 | AP2_ERF | [50-113] |
| | | | | and |
| | | | | [149-207] |

### Example 5

### Topology Prediction of the Polypeptide Sequences Useful in Performing the Methods of the Invention

[0685] TargetP 1.1 predicts the subcellular location of eukaryotic proteins. The location assignment is based on the predicted presence of any of the N-terminal pre-sequences: chloroplast transit peptide (cTP), mitochondrial targeting peptide (mTP) or secretory pathway signal peptide (SP). Scores on which the final prediction is based are not really probabilities, and they do not necessarily add to one. However, the location with the highest score is the most likely according to TargetP, and the relationship between the scores (the reliability class) may be an indication of how certain the prediction is. The reliability class (RC) ranges from 1 to 5, where 1 indicates the strongest prediction. TargetP is maintained at the server of the Technical University of Denmark.

[0686] For the sequences predicted to contain an N-terminal presequence a potential cleavage site can also be predicted.

[0687] A number of parameters were selected, such as organism group (non-plant or plant), cutoff sets (none, predefined set of cutoffs, or user-specified set of cutoffs), and the calculation of prediction of cleavage sites (yes or no).

### 1. FSM1-Like (Fruit Sant/Myb) Polypeptides

[0688] The results of TargetP 1.1 analysis of the polypeptide sequence as represented by SEQ ID NO: 2 are presented Table D1. The “plant” organism group has been selected, no cutoffs defined, and the predicted length of the transit peptide requested. The subcellular localization of the polypeptide sequence as represented by SEQ ID NO: 2 may be the cytoplasm or nucleus, no transit peptide is predicted.

TABLE D1
TargetP 1.1 analysis of the polypeptide sequence
as represented by SEQ ID NO: 2.

| Name | | | | | | | |
|---|---|---|---|---|---|---|---|
| TPlen | Len | cTP | mTP | SP | other | Loc | RC |
| SEQ ID NO: 2 | 88 | 0.505 | 0.093 | 0.089 | 0.548 | — | 5 |
| cutoff | | 0.000 | 0.000 | 0.000 | 0.000 | | |

Abbreviations: Len, Length; cTP, Chloroplastic transit peptide; mTP, Mitochondrial transit peptide, SP, Secretory pathway signal peptide, other, Other subcellular targeting, Loc, Predicted Location; RC, Reliability class; TPlen, Predicted transit peptide length.

[0689] When using the protein localisation prediction algorithm (PLOC, Park and Kanehisa, Bioinformatics, 19, 1656-1663, 2003), SEQ ID NO: 2 is predicted to have a nuclear localisation, which is in line with its postulated function as transcription factor.

[0690] Many other algorithms can be used to perform such analyses, including:
[0691] ChloroP 1.1 hosted on the server of the Technical University of Denmark;
[0692] Protein Prowler Subcellular Localisation Predictor version 1.2 hosted on the server of the Institute for Molecular Bioscience, University of Queensland, Brisbane, Australia;
[0693] PENCE Proteome Analyst PA-GOSUB 2.5 hosted on the server of the University of Alberta, Edmonton, Alberta, Canada;
[0694] TMHMM, hosted on the server of the Technical University of Denmark
[0695] PSORT (URL: psort.org)

### 2. PIF3-Like (Phytochrome Interacting Factor 3) Polypeptides

[0696] The results of TargetP 1.1 analysis of the polypeptide sequence as represented by SEQ ID NO: 293 are presented Table D2. The “plant” organism group has been selected, no cutoffs defined, and the predicted length of the transit peptide requested. The subcellular localization of the polypeptide sequence as represented by SEQ ID NO: 293 may be the cytoplasm or nucleus, no transit peptide is predicted.

TABLE D2
TargetP 1.1 analysis of the polypeptide sequence
as represented by SEQ ID NO: 293.

| Name | | | | | | | |
|---|---|---|---|---|---|---|---|
| TPlen | Len | cTP | mTP | SP | other | Loc | RC |
| OsPIF3 | 445 | 0.173 | 0.067 | 0.046 | 0.897 | — | 2 |
| cutoff | | 0.000 | 0.000 | 0.000 | 0.000 | | |

Abbreviations: Len, Length; cTP, Chloroplastic transit peptide; mTP, Mitochondrial transit peptide, SP, Secretory pathway signal peptide, other, Other subcellular targeting, Loc, Predicted Location; RC, Reliability class; TPlen, Predicted transit peptide length.

[0697] When analysed with PLOC (Park and Kanehisa, Bioinformatics, 19, 1656-1663, 2003), a nuclear localisation is predicted, which is in line with the experimental data (Fairchild et al., 2000).

[0698] Many other algorithms can be used to perform such analyses, including:
[0699] ChloroP 1.1 hosted on the server of the Technical University of Denmark;
[0700] Protein Prowler Subcellular Localisation Predictor version 1.2 hosted on the server of the Institute for Molecular Bioscience, University of Queensland, Brisbane, Australia;
[0701] PENCE Proteome Analyst PA-GOSUB 2.5 hosted on the server of the University of Alberta, Edmonton, Alberta, Canada;
[0702] TMHMM, hosted on the server of the Technical University of Denmark
[0703] PSORT (URL: psort.org)

### 3. UROD (Uroporphyrinogen III Decarboxylase) Polypeptide

[0704] Many other algorithms can be used to perform such analyses, including:
[0705] ChloroP 1.1 hosted on the server of the Technical University of Denmark;
[0706] Protein Prowler Subcellular Localisation Predictor version 1.2 hosted on the server of the Institute for Molecular Bioscience, University of Queensland, Brisbane, Australia;
[0707] PENCE Proteome Analyst PA-GOSUB 2.5 hosted on the server of the University of Alberta, Edmonton, Alberta, Canada;
[0708] TMHMM, hosted on the server of the Technical University of Denmark
[0709] PSORT (URL: psort.org)
[0710] PLOC (Park and Kanehisa, Bioinformatics, 19, 1656-1663, 2003).

### 4. AS-MTT (Abiotic Stress Membrane Tethered Transcription Factor) Polypeptides

[0711] Many other algorithms can be used to perform such analyses, including:
[0712] ChloroP 1.1 hosted on the server of the Technical University of Denmark;
[0713] Protein Prowler Subcellular Localisation Predictor version 1.2 hosted on the server of the Institute for Molecular Bioscience, University of Queensland, Brisbane, Australia;
[0714] PENCE Proteome Analyst PA-GOSUB 2.5 hosted on the server of the University of Alberta, Edmonton, Alberta, Canada;
[0715] TMHMM, hosted on the server of the Technical University of Denmark
[0716] PSORT (URL: psort.org)
[0717] PLOC (Park and Kanehisa, Bioinformatics, 19, 1656-1663, 2003).

### 5. EXO-1 Polypeptide

[0718] Many other algorithms can be used to perform such analyses, including:
[0719] ChloroP 1.1 hosted on the server of the Technical University of Denmark;
[0720] Protein Prowler Subcellular Localisation Predictor version 1.2 hosted on the server of the Institute for Molecular Bioscience, University of Queensland, Brisbane, Australia;
[0721] PENCE Proteome Analyst PA-GOSUB 2.5 hosted on the server of the University of Alberta, Edmonton, Alberta, Canada;
[0722] TMHMM, hosted on the server of the Technical University of Denmark
[0723] PSORT (URL: psort.org)
[0724] PLOC (Park and Kanehisa, Bioinformatics, 19, 1656-1663, 2003).

### 6. YiAP2 Polypeptides

[0725] Many other algorithms can be used to perform such analyses, including:
[0726] ChloroP 1.1 hosted on the server of the Technical University of Denmark;
[0727] Protein Prowler Subcellular Localisation Predictor version 1.2 hosted on the server of the Institute for Molecular Bioscience, University of Queensland, Brisbane, Australia;
[0728] PENCE Proteome Analyst PA-GOSUB 2.5 hosted on the server of the University of Alberta, Edmonton, Alberta, Canada;
[0729] TMHMM, hosted on the server of the Technical University of Denmark
[0730] PSORT (URL: psort.org)
[0731] PLOC (Park and Kanehisa, Bioinformatics, 19, 1656-1663, 2003).

### Example 6

### Assay Related to the Polypeptide Sequences Useful in Performing the Methods of the Invention

### 1. FSM1-Like (Fruit Sant/Myb) Polypeptides

[0732] DNA binding assays are well known in the art, including PCR-assisted DNA binding site selection and a DNA binding gel-shift assay; for a general reference, see Current Protocols in Molecular Biology, Volumes 1 and 2, Ausubel et al. (1994), Current Protocols.

[0733] A DNA binding assay for MYB7, as an example for MYB proteins in general, is described in Li and Parish (Plant J. 8, 963-972, 1995). Briefly, the MYB7 coding sequence is cloned in frame with the T7 gene 10 leader sequence and expressed in E. coli. The proteins are purified and analysed in a mobility retardation assay, using 32P-labeled c-myb binding site (MBS) and the binding site of the maize P gene product (PBS). In this way, it was shown that MYB7 from Arabidopsis thaliana did bind to the MBS site though not with high affinity, and had a binding preference for the PBS site.

2. PIF3-like (Phytochrome Interacting Factor 3) polypeptides

[0734] In Arabidopsis, PIF3 forms a complex with HFR1. Fairchild et al. (2000) describe a yeast two-hybrid binding assay as well as immunoprecipitations for demonstrating this interaction in vitro. The yeast two-hybrid assay was carried out according to standard procedures, for the immunoprecipitations, either mixtures of PIF3, GAD (galactose activation domain) and the HFR1-GAD fusion, or mixtures of HFR, GAD and the PIF3-GAD fusion were used (Fairchild et al., 2000).

[0735] Following a pulse of red light, phyA, phyB, phyC, and phyD interact in vivo with the PHYTOCHROME INTERACTING FACTOR3 basic helix-loop-helix transcription factor. These interactions were demonstrated using a yeast two-hybrid binding assay as well as immunoprecipitations (Clack et al., Plant Cell. 2009 March; 21(3):786-99) Al-Sady et al. (Molecular Cell. 2006 Aug. 4; 23(3):439-46) provide evidence that photoactivation of phy induces rapid in vivo phosphorylation of PIF3 preceding degradation. Both phyA and phyB redundantly induce this PIF3 phosphorylation, as well as nuclear speckle formation and degradation, by direct interaction with PIF3 via separate binding sites.

### 3. UROD (Uroporphyrinogen III Decarboxylase) Polypeptide

[0736] Porphyrin activity is measured using chromatographic and spectral methods, such as HPLC and TLC as described in Jacobs and Jacobs, 1993 (Plant Physiol. 101(4): 1181-1187) and Magnetic Circular Dichroism as described in Ivanetich et al., 1984 (Clin Chem. 30(3): 391-4).

### 4. EXO-1 Polypeptide

[0737] Functional assays were performed according to Furukawa et al, 2008—Plant Mol Biol (2008) 66:519-531. Enzymatic assays were performed according to Furukawa et al, 2003—Plant Molecular Biology 51: 59-70, 2003.

### Example 7

### Cloning of the Nucleic Acid Sequence Used in the Methods of the Invention

### 1. FSM1-Like (Fruit Sant/Myb) Polypeptides

[0738] The nucleic acid sequence was amplified by PCR using as template a custom-made Solanum lycopersicum seedlings cDNA library (in pCMV Sport 6.0; Invitrogen, Paisley, UK). PCR was performed using Hifi Taq DNA polymerase in standard conditions, using 200 ng of template in a 50 μl PCR mix. The primers used were prm10562 (SEQ ID NO: 290; sense, start codon in bold): 5′-ggggacaagtttgtacaaaaaagcaggcttaaacaatgagctcgatgtcgtctca-3′ and prm10563 (SEQ ID NO: 291; reverse, complementary): 5′-ggggaccactttgtacaagaaagctggg taagtgttaggttttgctccttt-3′, which include the AttB sites for Gateway recombination. The amplified PCR fragment was purified also using standard methods. The first step of the Gateway procedure, the BP reaction, was then performed, during which the PCR fragment recombined in vivo with the pDONR201 plasmid to produce, according to the Gateway terminology, an “entry clone”, pFSM1-like. Plasmid pDONR201 was purchased from Invitrogen, as part of the Gateway® technology.

[0739] The entry clone comprising SEQ ID NO: 1 was then used in an LR reaction with a destination vector used for Oryza sativa transformation. This vector contained as functional elements within the T-DNA borders: a plant selectable marker; a screenable marker expression cassette; and a Gateway cassette intended for LR in vivo recombination with the nucleic acid sequence of interest already cloned in the entry clone. A rice GOS2 promoter (SEQ ID NO: 289) for constitutive specific expression was located upstream of this Gateway cassette.

[0740] After the LR recombination step, the resulting expression vector pGOS2::FSM1-like (FIG. 3) was transformed into Agrobacterium strain LBA4044 according to methods well known in the art.

### 2. PIF3-Like (Phytochrome Interacting Factor 3) Polypeptides

[0741] The nucleic acid sequence was amplified by PCR using as template a custom-made Oryza sativa seedlings cDNA library (in pCMV Sport 6.0; Invitrogen, Paisley, UK). PCR was performed using Hifi Taq DNA polymerase in standard conditions, using 200 ng of template in a 50 μl PCR mix. The primers used were prm12326 (SEQ ID NO: 364; sense, start codon in bold): 5′-ggggacaagtttgtacaaaaaagcaggcttaaacaatgaaccagttcgtccctg-3′ and prm12327 (SEQ ID NO: 365; reverse, complementary): 5′-ggggaccactttgtacaagaaagctgggtcagaa tgtcgtcaggagtcag-3′, which include the AttB sites for Gateway recombination. The amplified PCR fragment was purified also using standard methods. The first step of the Gateway procedure, the BP reaction, was then performed, during which the PCR fragment recombined in vivo with the pDONR201 plasmid to produce, according to the Gateway terminology, an “entry clone”, pPIF3-like. Plasmid pDONR201 was purchased from Invitrogen, as part of the Gateway® technology.

[0742] The entry clone comprising SEQ ID NO: 292 was then used in an LR reaction with a destination vector used for Oryza sativa transformation. This vector contained as functional elements within the T-DNA borders: a plant selectable marker; a screenable marker expression cassette; and a Gateway cassette intended for LR in vivo recombination with the nucleic acid sequence of interest already cloned in the entry clone. A rice GOS2 promoter (SEQ ID NO: 366) for constitutive specific expression was located upstream of this Gateway cassette.

[0743] After the LR recombination step, the resulting expression vector pGOS2::PIF3-like (FIG. 7) was transformed into Agrobacterium strain LBA4044 according to methods well known in the art.

### 3. UROD (Uroporphyrinogen III Decarboxylase) Polypeptide

[0744] The nucleic acid sequence was amplified by PCR using a Populus trichocarpa cDNA library (in pCMV Sport 6.0; Invitrogen, Paisley, UK). PCR was performed using Hifi Taq DNA polymerase in standard conditions, using 200 ng of template in a 50 μl PCR mix. The primers used were prm12179 (SEQ ID NO: 534; sense, start codon in bold): 5′-ggggacaag tttgtacaaaaaagcaggcttaaacaatgaactctgcttctcttagc-3′ and prm12180 (SEQ ID NO: 535; reverse, complementary): 5′-ggggaccactttgtacaagaaagctgggtgacaccactccttaaactacc-3′, which include the AttB sites for Gateway recombination. The amplified PCR fragment was purified also using standard methods. The first step of the Gateway procedure, the BP reaction, was then performed, during which the PCR fragment recombined in vivo with the pDONR201 plasmid to produce, according to the Gateway terminology, an “entry clone”, pUROD. Plasmid pDONR201 was purchased from Invitrogen, as part of the Gateway® technology.

[0745] The entry clone comprising SEQ ID NO: 367 was then used in an LR reaction with a destination vector used for Oryza sativa transformation. This vector contained as functional elements within the T-DNA borders: a plant selectable marker; a screenable marker expression cassette; and a Gateway cassette intended for LR in vivo recombination with the nucleic acid sequence of interest already cloned in the entry clone. A rice GOS2 promoter (SEQ ID NO: 533) for constitutive specific expression was located upstream of this Gateway cassette.

[0746] After the LR recombination step, the resulting expression vector pGOS2::UROD (FIG. 9) was transformed into Agrobacterium strain LBA4044 according to methods well known in the art.

### 4. AS-MTT (Abiotic Stress Membrane Tethered Transcription Factor) Polypeptides

[0747] The nucleic acid sequence used in the methods of the invention was amplified by PCR using as template a custom-made Populus trichocarpa v1.1 seedlings cDNA library (in pCMV Sport 6.0; Invitrogen, Paisley, UK). PCR was performed using Hifi Taq DNA polymerase in standard conditions, using 200 ng of template in a 50 μl PCR mix. The primers used were as represented by SEQ ID NO: 657 (sense) and SEQ ID NO: 658 (reverse, complementary) which include the AttB sites for Gateway recombination. The amplified PCR fragment was purified also using standard methods. The first step of the Gateway procedure, the BP reaction, was then performed, during which the PCR fragment recombined in vivo with the pDONR201 plasmid to produce, according to the Gateway terminology, an “entry clone”, pAS_MTT. Plasmid pDONR201 was purchased from Invitrogen, as part of the Gateway® technology.

[0748] The entry clone comprising SEQ ID NO: 536 was then used in an LR reaction with a destination vector used for Oryza sativa transformation. This vector contained as functional elements within the T-DNA borders: a plant selectable marker; a screenable marker expression cassette; and a Gateway cassette intended for LR in vivo recombination with the nucleic acid sequence of interest already cloned in the entry clone. A rice GOS2 promoter (SEQ ID NO: 659) for constitutive specific expression was located upstream of this Gateway cassette.

[0749] After the LR recombination step, the resulting expression vector pGOS2::AS-MTT (FIG. 11) was transformed into Agrobacterium strain LBA4044 according to methods well known in the art.

### 5. EXO-1 Polypeptide

[0750] The nucleic acid sequence was amplified by PCR using as template a custom-made Populus trichocarpa seedlings cDNA library (in pCMV Sport 6.0; Invitrogen, Paisley, UK). PCR was performed using Hifi Taq DNA polymerase in standard conditions, using 200 ng of template in a 50 μl PCR mix.

[0751] The primers used were prm12748 (SEQ ID NO: 833; sense, start codon in bold): 5′-gggga caagtttgtacaaaaaagcaggcttaaacaatgggaatacaagggctttta-3′ and prm12749 (SEQ ID NO: 834; reverse, complementary): 5′-ggggaccactttgtacaagaaagctgggtgttttccaaaagtcagcgtct-3′, which include the AttB sites for Gateway recombination. The amplified PCR fragment was purified also using standard methods. The first step of the Gateway procedure, the BP reaction, was then performed, during which the PCR fragment recombined in vivo with the pDONR201 plasmid to produce, according to the Gateway terminology, an “entry clone”, pEXO-1. Plasmid pDONR201 was purchased from Invitrogen, as part of the Gateway® technology.

[0752] The entry clone comprising SEQ ID NO: 762 was then used in an LR reaction with a destination vector used for Oryza sativa transformation. This vector contained as functional elements within the T-DNA borders: a plant selectable marker; a screenable marker expression cassette; and a Gateway cassette intended for LR in vivo recombination with the nucleic acid sequence of interest already cloned in the entry clone.

[0753] A rice GOS2 promoter (SEQ ID NO: 831) for constitutive specific expression was located upstream of this Gateway cassette. After the LR recombination step, the resulting expression vector pGOS2::EXO-1 (FIG. 13) was transformed into Agrobacterium strain LBA4044 according to methods well known in the art.

[0754] A rice beta expansin EXPB9 promoter (SEQ ID NO: 832) for shoot specific expression was located upstream of this Gateway cassette. After the LR recombination step, the resulting expression vector p EXPB9::EXO-1 (FIG. 14) was transformed into Agrobacterium strain LBA4044 according to methods well known in the art.

### 6. YiAP2 Polypeptides

[0755] The nucleic acid sequence was amplified by PCR using as template a custom-made Medicago truncatula seedlings cDNA library (in pCMV Sport 6.0; Invitrogen, Paisley, UK). PCR was performed using Hifi Taq DNA polymerase in standard conditions, using 200 ng of template in a 50 μl PCR mix. The primers used were: 5′-ggggacaagtttgtacaaaaa agcaggcttaaacaatggcgaaaaaatcgca-3′ (SEQ ID NO: 887; sense, start) and 5′-ggggaccactt tgtacaagaaagctgggtccatattctcttttgaattgagc-3′ (SEQ ID NO: 888; reverse, complementary)

which include the AttB sites for Gateway recombination. The amplified PCR fragment was purified also using standard methods. The first step of the Gateway procedure, the BP reaction, was then performed, during which the PCR fragment recombined in vivo with the pDONR201 plasmid to produce, according to the Gateway terminology, an “entry clone”, pYiAP2. Plasmid pDONR201 was purchased from Invitrogen, as part of the Gateway® technology.

[0756] The entry clone comprising SEQ ID NO: 835 was then used in an LR reaction with a destination vector used for Oryza sativa transformation. This vector contained as functional elements within the T-DNA borders: a plant selectable marker; a screenable marker expression cassette; and a Gateway cassette intended for LR in vivo recombination with the nucleic acid sequence of interest already cloned in the entry clone. A rice GOS2 promoter (SEQ ID NO: 890) for constitutive specific expression was located upstream of this Gateway cassette.

[0757] After the LR recombination step, the resulting expression vector pGOS2::YiAP2 (FIG. 16) was transformed into Agrobacterium strain LBA4044 according to methods well known in the art.

### Example 8

### Plant Transformation

### Rice Transformation

[0758] The Agrobacterium containing the expression vector was used to transform Oryza sativa plants. Mature dry seeds of the rice japonica cultivar Nipponbare were dehusked. Sterilization was carried out by incubating for one minute in 70% ethanol, followed by 30 minutes in 0.2% HgCl2, followed by a 6 times 15 minutes wash with sterile distilled water. The sterile seeds were then germinated on a medium containing 2,4-D (callus induction medium). After incubation in the dark for four weeks, embryogenic, scutellum-derived calli were excised and propagated on the same medium. After two weeks, the calli were multiplied or propagated by subculture on the same medium for another 2 weeks. Embryogenic callus pieces were sub-cultured on fresh medium 3 days before co-cultivation (to boost cell division activity).

[0759] Agrobacterium strain LBA4404 containing the expression vector was used for co-cultivation. Agrobacterium was inoculated on AB medium with the appropriate antibiotics and cultured for 3 days at 28° C. The bacteria were then collected and suspended in liquid co-cultivation medium to a density (OD600) of about 1. The suspension was then transferred to a Petri dish and the calli immersed in the suspension for 15 minutes. The callus tissues were then blotted dry on a filter paper and transferred to solidified, co-cultivation medium and incubated for 3 days in the dark at 25° C. Co-cultivated calli were grown on 2,4-D-containing medium for 4 weeks in the dark at 28° C. in the presence of a selection agent. During this period, rapidly growing resistant callus islands developed. After transfer of this material to a regeneration medium and incubation in the light, the embryogenic potential was released and shoots developed in the next four to five weeks. Shoots were excised from the calli and incubated for 2 to 3 weeks on an auxin-containing medium from which they were transferred to soil. Hardened shoots were grown under high humidity and short days in a greenhouse.

[0760] Approximately 35 independent T0 rice transformants were generated for one construct. The primary transformants were transferred from a tissue culture chamber to a greenhouse. After a quantitative PCR analysis to verify copy number of the T-DNA insert, only single copy transgenic plants that exhibit tolerance to the selection agent were kept for harvest of T1 seed. Seeds were then harvested three to five months after transplanting. The method yielded single locus transformants at a rate of over 50% (Aldemita and Hodges 1996, Chan et al. 1993, Hiei et al. 1994).

### Example 9

### Transformation of Other Crops

### Corn Transformation

[0761] Transformation of maize (Zea mays) is performed with a modification of the method described by Ishida et al. (1996) Nature Biotech 14(6): 745-50. Transformation is genotype-dependent in corn and only specific genotypes are amenable to transformation and regeneration. The inbred line A188 (University of Minnesota) or hybrids with A188 as a parent are good sources of donor material for transformation, but other genotypes can be used successfully as well. Ears are harvested from corn plant approximately 11 days after pollination (DAP) when the length of the immature embryo is about 1 to 1.2 mm. Immature embryos are cocultivated with Agrobacterium tumefaciens containing the expression vector, and transgenic plants are recovered through organogenesis. Excised embryos are grown on callus induction medium, then maize regeneration medium, containing the selection agent (for example imidazolinone but various selection markers can be used). The Petri plates are incubated in the light at 25° C. for 2-3 weeks, or until shoots develop. The green shoots are transferred from each embryo to maize rooting medium and incubated at 25° C. for 2-3 weeks, until roots develop. The rooted shoots are transplanted to soil in the greenhouse. T1 seeds are produced from plants that exhibit tolerance to the selection agent and that contain a single copy of the T-DNA insert.

### Wheat Transformation

[0762] Transformation of wheat is performed with the method described by Ishida et al. (1996) Nature Biotech 14(6): 745-50. The cultivar Bobwhite (available from CIMMYT, Mexico) is commonly used in transformation. Immature embryos are co-cultivated with Agrobacterium tumefaciens containing the expression vector, and transgenic plants are recovered through organogenesis. After incubation with Agrobacterium, the embryos are grown in vitro on callus induction medium, then regeneration medium, containing the selection agent (for example imidazolinone but various selection markers can be used). The Petri plates are incubated in the light at 25° C. for 2-3 weeks, or until shoots develop. The green shoots are transferred from each embryo to rooting medium and incubated at 25° C. for 2-3 weeks, until roots develop. The rooted shoots are transplanted to soil in the greenhouse. T1 seeds are produced from plants that exhibit tolerance to the selection agent and that contain a single copy of the T-DNA insert.

### Soybean Transformation

[0763] Soybean is transformed according to a modification of the method described in the Texas A&M patent U.S. Pat. No. 5,164,310. Several commercial soybean varieties are amenable to transformation by this method. The cultivar Jack (available from the Illinois Seed foundation) is commonly used for transformation. Soybean seeds are sterilised for in vitro sowing. The hypocotyl, the radicle and one cotyledon are excised from seven-day old young seedlings. The epicotyl and the remaining cotyledon are further grown to develop axillary nodes. These axillary nodes are excised and incubated with Agrobacterium tumefaciens containing the expression vector. After the cocultivation treatment, the explants are washed and transferred to selection media. Regenerated shoots are excised and placed on a shoot elongation medium. Shoots no longer than 1 cm are placed on rooting medium until roots develop. The rooted shoots are transplanted to soil in the greenhouse. T1 seeds are produced from plants that exhibit tolerance to the selection agent and that contain a single copy of the T-DNA insert.

### Rapeseed/Canola Transformation

[0764] Cotyledonary petioles and hypocotyls of 5-6 day old young seedling are used as explants for tissue culture and transformed according to Babic et al. (1998, Plant Cell Rep 17: 183-188). The commercial cultivar Westar (Agriculture Canada) is the standard variety used for transformation, but other varieties can also be used. Canola seeds are surface-sterilized for in vitro sowing. The cotyledon petiole explants with the cotyledon attached are excised from the in vitro seedlings, and inoculated with Agrobacterium (containing the expression vector) by dipping the cut end of the petiole explant into the bacterial suspension. The explants are then cultured for 2 days on MSBAP-3 medium containing 3 mg/l BAP, 3% sucrose, 0.7% Phytagar at 23° C., 16 hr light. After two days of co-cultivation with Agrobacterium, the petiole explants are transferred to MSBAP-3 medium containing 3 mg/l BAP, cefotaxime, carbenicillin, or timentin (300 mg/l) for 7 days, and then cultured on MSBAP-3 medium with cefotaxime, carbenicillin, or timentin and selection agent until shoot regeneration. When the shoots are 5-10 mm in length, they are cut and transferred to shoot elongation medium (MSBAP-0.5, containing 0.5 mg/l BAP). Shoots of about 2 cm in length are transferred to the rooting medium (MS0) for root induction. The rooted shoots are transplanted to soil in the greenhouse. T1 seeds are produced from plants that exhibit tolerance to the selection agent and that contain a single copy of the T-DNA insert.

### Alfalfa Transformation

[0765] A regenerating clone of alfalfa (Medicago sativa) is transformed using the method of (McKersie et al., 1999 Plant Physiol 119: 839-847). Regeneration and transformation of alfalfa is genotype dependent and therefore a regenerating plant is required. Methods to obtain regenerating plants have been described. For example, these can be selected from the cultivar Rangelander (Agriculture Canada) or any other commercial alfalfa variety as described by Brown D C W and A Atanassov (1985. Plant Cell Tissue Organ Culture 4: 111-112). Alternatively, the RA3 variety (University of Wisconsin) has been selected for use in tissue culture (Walker et al., 1978 Am J Bot 65:654-659). Petiole explants are cocultivated with an overnight culture of Agrobacterium tumefaciens C58C1 pMP90 (McKersie et al., 1999 Plant Physiol 119: 839-847) or LBA4404 containing the expression vector. The explants are cocultivated for 3 d in the dark on SH induction medium containing 288 mg/L Pro, 53 mg/L thioproline, 4.35 g/L K2SO4, and 100 μm acetosyringinone. The explants are washed in half-strength Murashige-Skoog medium (Murashige and Skoog, 1962) and plated on the same SH induction medium without acetosyringinone but with a suitable selection agent and suitable antibiotic to inhibit Agrobacterium growth. After several weeks, somatic embryos are transferred to BOi2Y development medium containing no growth regulators, no antibiotics, and 50 g/L sucrose. Somatic embryos are subsequently germinated on half-strength Murashige-Skoog medium. Rooted seedlings were transplanted into pots and grown in a greenhouse. T1 seeds are produced from plants that exhibit tolerance to the selection agent and that contain a single copy of the T-DNA insert.

### Cotton Transformation

[0766] Cotton is transformed using Agrobacterium tumefaciens according to the method described in U.S. Pat. No. 5,159,135. Cotton seeds are surface sterilised in 3% sodium hypochlorite solution during 20 minutes and washed in distilled water with 500 μg/ml cefotaxime. The seeds are then transferred to SH-medium with 50 μg/ml benomyl for germination. Hypocotyls of 4 to 6 days old seedlings are removed, cut into 0.5 cm pieces and are placed on 0.8% agar. An Agrobacterium suspension (approx. 108 cells per ml, diluted from an overnight culture transformed with the gene of interest and suitable selection markers) is used for inoculation of the hypocotyl explants. After 3 days at room temperature and lighting, the tissues are transferred to a solid medium (1.6 g/l Gelrite) with Murashige and Skoog salts with B5 vitamins (Gamborg et al., Exp. Cell Res. 50:151-158 (1968)), 0.1 mg/l 2,4-D, 0.1 mg/l 6-furfurylaminopurine and 750 μg/ml MgCL2, and with 50 to 100 μg/ml cefotaxime and 400-500 μg/ml carbenicillin to kill residual bacteria. Individual cell lines are isolated after two to three months (with subcultures every four to six weeks) and are further cultivated on selective medium for tissue amplification (30° C., 16 hr photoperiod). Transformed tissues are subsequently further cultivated on non-selective medium during 2 to 3 months to give rise to somatic embryos. Healthy looking embryos of at least 4 mm length are transferred to tubes with SH medium in fine vermiculite, supplemented with 0.1 mg/l indole acetic acid, 6 furfurylaminopurine and gibberellic acid. The embryos are cultivated at 30° C. with a photoperiod of 16 hrs, and plantlets at the 2 to 3 leaf stage are transferred to pots with vermiculite and nutrients. The plants are hardened and subsequently moved to the greenhouse for further cultivation.

### Example 10

### Phenotypic Evaluation Procedure

### 10.1 Evaluation Setup

[0767] Approximately 35 independent T0 rice transformants were generated. The primary transformants were transferred from a tissue culture chamber to a greenhouse for growing and harvest of T1 seed. Six events, of which the T1 progeny segregated 3:1 for presence/absence of the transgene, were retained. For each of these events, approximately 10 T1 seedlings containing the transgene (hetero- and homo-zygotes) and approximately 10 T1 seedlings lacking the transgene (nullizygotes) were selected by monitoring visual marker expression. The transgenic plants and the corresponding nullizygotes were grown side-by-side at random positions. Greenhouse conditions were of shorts days (12 hours light), 28° C. in the light and 22° C. in the dark, and a relative humidity of 70%. Plants grown under non-stress conditions were watered at regular intervals to ensure that water and nutrients were not limiting and to satisfy plant needs to complete growth and development.

[0768] Four T1 events were further evaluated in the T2 generation following the same evaluation procedure as for the T1 generation but with more individuals per event. From the stage of sowing until the stage of maturity the plants were passed several times through a digital imaging cabinet. At each time point digital images (2048×1536 pixels, 16 million colours) were taken of each plant from at least 6 different angles.

### Drought Screen

[0769] Plants from T2 seeds were grown in potting soil under normal conditions until they approached the heading stage. They were then transferred to a “dry” section where irrigation was withheld. Humidity probes were inserted in randomly chosen pots to monitor the soil water content (SWC). When SWC went below certain thresholds, the plants were automatically re-watered continuously until a normal level was reached again. The plants were then re-transferred again to normal conditions. The rest of the cultivation (plant maturation, seed harvest) was the same as for plants not grown under abiotic stress conditions. Growth and yield parameters were recorded as detailed for growth under normal conditions.

### Nitrogen Use Efficiency Screen

[0770] Rice plants from T2 seeds are grown in potting soil under normal conditions except for the nutrient solution. The pots are watered from transplantation to maturation with a specific nutrient solution containing reduced N nitrogen (N) content, usually between 7 to 8 times less. The rest of the cultivation (plant maturation, seed harvest) is the same as for plants not grown under abiotic stress. Growth and yield parameters are recorded as detailed for growth under normal conditions.

### Salt Stress Screen

[0771] Plants are grown on a substrate made of coco fibers and argex (3 to 1 ratio). A normal nutrient solution is used during the first two weeks after transplanting the plantlets in the greenhouse. After the first two weeks, 25 mM of salt (NaCl) is added to the nutrient solution, until the plants are harvested. Seed-related parameters are then measured.

### 10.2 Statistical Analysis: F Test

[0772] A two factor ANOVA (analysis of variants) was used as a statistical model for the overall evaluation of plant phenotypic characteristics. An F test was carried out on all the parameters measured of all the plants of all the events transformed with the gene of the present invention. The F test was carried out to check for an effect of the gene over all the transformation events and to verify for an overall effect of the gene, also known as a global gene effect. The threshold for significance for a true global gene effect was set at a 5% probability level for the F test. A significant F test value points to a gene effect, meaning that it is not only the mere presence or position of the gene that is causing the differences in phenotype.

[0773] Where two experiments with overlapping events were carried out, a combined analysis was performed. This is useful to check consistency of the effects over the two experiments, and if this is the case, to accumulate evidence from both experiments in order to increase confidence in the conclusion. The method used was a mixed-model approach that takes into account the multilevel structure of the data (i.e. experiment-event-segregants). P values were obtained by comparing likelihood ratio test to chi square distributions.

### 10.3 Parameters Measured

### Biomass-Related Parameter Measurement

[0774] From the stage of sowing until the stage of maturity the plants were passed several times through a digital imaging cabinet. At each time point digital images (2048×1536 pixels, 16 million colours) were taken of each plant from at least 6 different angles.

[0775] The plant aboveground area (or leafy biomass) was determined by counting the total number of pixels on the digital images from aboveground plant parts discriminated from the background. This value was averaged for the pictures taken on the same time point from the different angles and was converted to a physical surface value expressed in square mm by calibration. Experiments show that the aboveground plant area measured this way correlates with the biomass of plant parts above ground. The above ground area is the area measured at the time point at which the plant had reached its maximal leafy biomass. The early vigour is the plant (seedling) aboveground area three weeks post-germination. Increase in root biomass is expressed as an increase in total root biomass (measured as maximum biomass of roots observed during the lifespan of a plant (RootMax)), or as the maximum biomass of roots with a thickness above a certain threshold observed during the lifespan of a plant (RootThickMax); or as an increase in the root/shoot index (measured as the ratio between root mass and shoot mass in the period of active growth of root and shoot).

[0776] Early vigour was determined by counting the total number of pixels from aboveground plant parts discriminated from the background. This value was averaged for the pictures taken on the same time point from different angles and was converted to a physical surface value expressed in square mm by calibration. The results described below are for plants three weeks post-germination.

### Seed-Related Parameter Measurements

[0777] The mature primary panicles were harvested, counted, bagged, barcode-labelled and then dried for three days in an oven at 37° C. The panicles were then threshed and all the seeds were collected and counted. The filled husks were separated from the empty ones using an air-blowing device. The empty husks were discarded and the remaining fraction was counted again. The filled husks were weighed on an analytical balance. The number of filled seeds was determined by counting the number of filled husks that remained after the separation step. The total seed yield was measured by weighing all filled husks harvested from a plant. Total seed number per plant was measured by counting the number of husks harvested from a plant. Thousand Kernel Weight (TKW) is extrapolated from the number of filled seeds counted and their total weight. The Harvest Index (HI) in the present invention is defined as the ratio between the total seed yield and the above ground area (mm²), multiplied by a factor 10⁶. The total number of flowers per panicle as defined in the present invention is the ratio between the total number of seeds and the number of mature primary panicles. The seed fill rate as defined in the present invention is the proportion (expressed as a %) of the number of filled seeds over the total number of seeds (or florets).

### Examples 11

### Results of the Phenotypic Evaluation of the Transgenic Plants

### 1. FSM1-Like (Fruit Sant/Myb) Polypeptides

[0778] The results of the evaluation of transgenic rice plants expressing SEQ ID NO: 1 under non-stress conditions are presented below. T1 plants exhibited increased seed yield and increased root biomass, and these observations were confirmed in a second evaluation with T2 plants, Tables E1 and E2 list the parameters for which the overall increase was at least 5%.

TABLE E1
Data summary for transgenic rice plants of the T1 generation;
for each parameter the overall percent increase is
shown and for each parameter the p-value is <0.05.

| Parameter | Overall |
|---|---|
| Fillrate | 19.9 |
| RootThickMax | 6.5 |

TABLE E2
Data summary for transgenic rice plants of the T2 generation;
for each parameter the overall percent increase is shown
and for each parameter the p-value is <0.05.

| Parameter | Overall |
|---|---|
| RootMax | 7.5 |
| Fillrate | 12.5 |

[0779] Furthermore, T1 plants had increased total seed weight (+17.1% overall increase, p<0.05), increased Harvest Index (+16.5% overall increase, p<0.05), increased number of filled seeds (+17.9% overall increase, p<0.05) and increased number of flowers per panicle (+10.6% overall increase, p<0.05). In addition, one of the tested lines in both T1 and T2 generation showed increased early vigour.

### 2. PIF3-Like (Phytochrome Interacting Factor 3) Polypeptides (Drought Stress)

[0780] Transgenic rice plants expressing SEQ ID NO: 293 under control of the rice GOS2 promoter and grown under drought stress showed increased Thousand Kernel Weight in both T1 and T2 generation, the overall increase in T2 was 6.6% with a p-value<0.05. The plants also had increased early vigour, with an overall increase of 27.7% in T2 (p-value<0.05)

### 3. UROD (Uroporphyrinogen III Decarboxylase) Polypeptide

[0781] a. Results Under Normal Growth Conditions

[0782] As shown in the tables below, transgenic rice expressing the UROD gene of SEQ ID NO: 367 under the control of the constitutive GOS2 promoter, and grown under normal conditions as described hereinabove, showed improved yield-related traits compared to control plants (corresponding nullizygotes).

[0783] Positive tendencies were observed in a first evaluation in some lines for the following parameters: aboveground area/biomass, emergence vigour, early flowering, total weight of seeds, seed fill rate, Thousand Kernel Weight, number of filled seeds, number of flowers per panicle, plant height.

[0784] The parameter For each parameter, the percentage overall is shown if it reaches p<0.05 and above the 5% threshold.

b. Results Under Drought Conditions

[0785] As shown in the tables below, transgenic rice expressing the UROD gene of SEQ ID NO: 367 under the control of the constitutive GOS2 promoter, and grown under drought conditions as described hereinabove, showed improved yield-related traits compared to control plants (corresponding nullizygotes). For each parameter, the percentage overall is shown if it reaches p<0.05 and above the 5% threshold.

[0786] In a first evaluation the following parameters showed p<0.05 and were above the 5% threshold: total weight of seeds, seed fill rate, harvest index.

### 1st Evaluation

TABLE E3

| Parameter | Overall |
|---|---|
| Total weight seeds | 21.1 |
| Seed filling rate | 33.7 |
| Harvest index | 25.0 |

[0788] In a second evaluation the parameters shown in the table below gave p<0.05 and were above the 5% threshold.

[0789] Although there was a decrease in the number of first panicles, there was an increase in the number of flowers per panicle.

### 2nd Evaluation

TABLE E4

| Parameter | Overall |
|---|---|
| Aboveground area | 6.6 |
| Emergence Vigour | 11.0 |
| Number of panicles | −14.0 |
| Number of flowers | 12.8 |
| per panicle | |

### 4. AS-MTT (Abiotic Stress Membrane Tethered Transcription Factor) Polypeptides

[0791] The results of the evaluation of transgenic rice plants in the T1 generation and expressing a nucleic acid comprising the longest Open Reading Frame in SEQ ID NO: 536 under the drought screen growth conditions as specified above are presented below. See previous Examples for details on the generations of the transgenic plants.

[0792] The results of the evaluation of transgenic rice plants under non-stress conditions are presented below. An increase of at least 5% was observed for root biomass (RootMax), root to shoot index (RootShlnd), total weight of seeds (totalwgseeds), seed filling rate (fillrate), harvest index (harvestindex), thousand kernel weight (TKW), number of filled seeds (nrfilledseed), Gravity center (GravityYMax), Thick roots (RootThickMax).

[0793] Gravity center (GravityYMax) is a measurement that correlate with increased in seed size and weight and a change in the shape of the canopy of the plant, such that the plant height and/or the leaf angle are altered in such a way that gravity center of the canopy is higher.

[0794] RootThickMax is a measure of the proportion of thick roots compared to the thin roots in the root system of a plant. The proportion of thick roots is typically used as a measure for the biomass of roots above a given thickness threshold. It is typically used as a measure for estimating soil penetration, plant stability, nutrient uptake, water uptake, and tolerance to biotic and abiotic stresses.

TABLE E5

| Parameter | Overall |
|---|---|
| RootMax | 6.9 |
| RootShInd | 7.6 |
| totalwgseeds | 27.1 |
| fillrate | 24.5 |
| harvestindex | 32.1 |
| TKW | 5.6 |
| nrfilledseed | 21.6 |
| GravityYMax | 6.2 |
| RootThickMax | 11.7 |

### 5. EXO-1 Polypeptide

[0795] The results of the evaluation of transgenic rice plants in the T1 generation and expressing a nucleic acid comprising the longest Open Reading Frame in SEQ ID NO: 762 under non-stress conditions are presented below. See previous Examples for details on the generations of the transgenic plants.

[0796] The results of the evaluation of transgenic rice plants under non-stress conditions are presented below (Table E6). An increase of at least 5% was observed for aboveground biomass (AreaMax), total root biomass (RootMax), root-shoot index (RootShlnd), yield per plant (totalwgseeds), fill rate (fillrate), harvest index (harvestindex), greenness of a plant before flowering (GNbfFlow), height of the plant (HeightMax; GravityYMax) and of 3.3% for thousand kernel weight (TKW).

TABLE E6
Data summary for transgenic rice plants;
for each parameter, the overall percent
increase relative to the wild type plant is shown.
For each parameter the p-value is <0.05.

| Parameter | Overall |
|---|---|
| AreaMax | 10.2 |
| RootMax | 12.5 |
| RootShInd | 6.2 |
| totalwgseeds | 19.7 |
| fillrate | 6.3 |
| harvestindex | 12.1 |
| TKW | 3.3 |
| GNbFlow | 6.6 |
| HeightMax | 5.4 |
| GravityYMax | 10.6 |

### 6. YiAP2 Polypeptides

[0797] The results of the evaluation of transgenic rice plants in the T1 generation and expressing a nucleic acid comprising the longest Open Reading Frame in SEQ ID NO: 835 under the control of the GOS2 promoter and grown under non-stress conditions are presented below. See previous Examples for details on the generations of the transgenic plants. An increase of at least 5% was observed for aboveground biomass (AreaMax), emergence vigour (early vigour), total seed yield (totalwgseeds), number of filled seeds (nrfilledseed), fill rate (fillrate), number of flowers per panicle, harvest index (harvestindex).

TABLE E7
Data summary for transgenic rice plants; for each
parameter (yield trait), the overall percent increase is
shown for the evaluation of plants of the T generation),
for each parameter the p-value is <0.05.

| Parameter | Overall increase |
|---|---|
| totalwgseeds | 26.5 |
| fillrate | 13.8 |
| harvestindex | 23.3 |
| nrfilledseed | 24.0 |

The application's sequence listing, which the Patent Office published only in electronic form, follows.

SEQUENCE LISTING (902 sequences)

SEQ ID NO: 1 - DNA, 267 bp, Solanum lycopersicum
atgagctcgatgtcgtctcaacatggttcttctggatcatggactgcgaaacaaaacaaggcgtttgagaaggcattggctgtgtatgacaaggaaactcgcgatcgttggtccaatgttgctaaagcagttggaggcaaaacagcagaagaagtgaaaagacactatgaaatccttttgagggatgttttctttattgacaatggtatggtgcccttccccaaatacaaaactactggaggatcccataattccacctctgattaa

SEQ ID NO: 2 - protein, 88 aa, Solanum lycopersicum
MSSMSSQHGSSGSWTAKQNKAFEKALAVYDKETRDRWSNVAKAVGGKTAEEVKRHYEILLRDVFFIDNGMVPFPKYKTTGGSHNSTSD

SEQ ID NO: 3 - DNA, 285 bp, Antirrhinum majus
atggcttcgagttcattgagttcgcgaaggccaggttcatggacgccacaagagaacaaattgttcgagaaggccttagcccggttcgaccaggacacacccgacaggtggcagaacgtggctagggcggttggtggcggtaagtcggcggaggaagtgaagaggcactaccatattctcatcgaggatcttcgtcgtatagaatccggtgatgtgcccttgccaaagtacaagaacaccaatgccgacgaagaaaaaaggcttctaaaatacctgaagatgtaa

SEQ ID NO: 4 - protein, 94 aa, Antirrhinum majus
MASSSLSSRRPGSWTPQENKLFEKALARFDQDTPDRWQNVARAVGGGKSAEEVKRHYHILIEDLRRIESGDVPLPKYKNTNADEEKRLLKYLKM

SEQ ID NO: 5 - DNA, 282 bp, Antirrhinum majus
atggcttcgactcgtggttctggccgcccttggtccgccaaggagaacaaagccttcgaaagagcattggcggtttacgacaaagacaccccagaccgttgggctaacgtggctagggccgtggagggacgaacaccggaagaagtgaagaagcactatgaaattctagtggaggatatcaagtatattgagagtgggaaagtgcccttccccaactacaggaccaccggtggtaacatgaaaactgacgagaaaaggttcagaaatctcaaaattcggtaa

SEQ ID NO: 6 - protein, 93 aa, Antirrhinum majus
MASTRGSGRPWSAKENKAFERALAVYDKDTPDRWANVARAVEGRTPEEVKKHYEILVEDIKYIESGKVPFPNYRTTGGNMKTDEKRFRNLKIR

SEQ ID NO: 7 - DNA, 303 bp, Arabidopsis thaliana
atggcctctagttctatgagctcgagctcttcttggacgtctaagcaaaacaagatgttcgagagggctttagccgtttacgataaagacactcccgaccgttggcaaaacgtggctaaagcagttggaagtaaatctgcagaggaagttaaacgtcactacgacatcctcgttgaagatctcatgaacatcgaacaagacttagtacctttgcctaaatacaaaaccgtcgatgttggaagtaaatctagaggcatcgatgattttgatttgaggttaatgaagaatatgagaatccagtga

SEQ ID NO: 8 - protein, 100 aa, Arabidopsis thaliana
MASSSMSSSSSWTSKQNKMFERALAVYDKDTPDRWQNVAKAVGSKSAEEVKRHYDILVEDLMNIEQDLVPLPKYKTVDVGSKSRGIDDFDLRLMKNMRIQ

SEQ ID NO: 9 - DNA, 294 bp, Arabidopsis thaliana
atggcgtcaaactcaagaagttcaatctcaccatggacgtttagtcaaaacaagatgttcgagagggccttggcagtttacgacaaggacacacccgaccgatggcacaatgtggcaaaagctgtcggagggaaaactgtagaagaagtgaagcgccactatgacattctcgtcgaggatctcatcaacatcgagactggtcgtgtccctttgcccaattacaagaccttcgaatctaactcaagaagcatcaatgactttgacacaaggaaaatgaagaatttgaagatctaa

SEQ ID NO: 10 - protein, 97 aa, Arabidopsis thaliana
MASNSRSSISPWTFSQNKMFERALAVYDKDTPDRWHNVAKAVGGKTVEEVKRHYDILVEDLINIETGRVPLPNYKTFESNSRSINDFDTRKMKNLKI

SEQ ID NO: 11 - DNA, 306 bp, Arabidopsis thaliana
atggcatcaggctcaatgtcttcttatggctctggctcatggactgttaagcagaacaaagcctttgagcgtgctctagcagtctatgaccaagacactccggaccgttggcacaatgttgctagagctgttggtggtaaaacaccagaagaagctaagagacagtatgaccttctagttcgtgacatcgaaagcatcgagaatggtcacgtgccattccctgactacaagactactacaggaaacagcaacagaggcaggctgcgtgatgaggaaaagaggatgagaagcatgaagctgcagtga

SEQ ID NO: 12 - protein, 101 aa, Arabidopsis thaliana
MASGSMSSYGSGSWTVKQNKAFERALAVYDQDTPDRWHNVARAVGGKTPEEAKRQYDLLVRDIESIENGHVPFPDYKTTTGNSNRGRLRDEEKRMRSMKLQ

SEQ ID NO: 13 - DNA, 258 bp, Arabidopsis thaliana
atggcttccaactcaatgagctctagcgcttcttggacacgtaaggagaacaaattatttgaaagggcgttggctacatatgaccaggacactcctgaccgttggcataacgttgcaagagccgttggcggcaaatcagctgaagaaaatatcacaacaattatccataagaaagcattcataaataatagacatgcactctccagtttcttatgcgtgtcttcttgtttcaccaggccagagaaaaaaaaaatctag

SEQ ID NO: 14 - protein, 85 aa, Arabidopsis thaliana
MASNSMSSSASWTRKENKLFERALATYDQDTPDRWHNVARAVGGKSAEENITTIIHKKAFINNRHALSSFLCVSSCFTRPEKKKI

SEQ ID NO: 15 - DNA, 303 bp, Arabidopsis thaliana
atggcatcaagctcaatgtcttctcagagctctggctcgtggactgctaagcagaacaaagcctttgagcaggctctagcaacctatgaccaggacactcctaaccgttggcaaaatgttgccaaagtcgtgggtggaaaaacaacagaggaggtaaagagacactacgaactcttagtgcaagacatcaacagcatagagaacggtcatgttccattcccaaactacaggactagtggaggctgcactaatggcaggcttagtcaggaggaaaaaaggatgagaaacatgaggctgcagtaa

SEQ ID NO: 16 - protein, 100 aa, Arabidopsis thaliana
MASSSMSSQSSGSWTAKQNKAFEQALATYDQDTPNRWQNVAKVVGGKTTEEVKRHYELLVQDINSIENGHVPFPNYRTSGGCTNGRLSQEEKRMRNMRLQ

SEQ ID NO: 17 - DNA, 303 bp, Brassica napus
atggcatcaaactcaatgtctgcttatggatctggctcatggactgttaagcagagcaaagcctttgagagtgctctagcaacctatgaccaggactcccctgaccgttggtacaatgtcgctagagctgttggtgggacaacaccagatgaagctaagagacaatacgagcttctcgtacgtgacatagaaagcattgagaatgggcacgtggcattccctaactacaagactaatggaggcagcactaagggcaggctgcgtgatgaggaaaaaaggatgagaagcatgaagctgcagtga

SEQ ID NO: 18 - protein, 100 aa, Brassica napus
MASNSMSAYGSGSWTVKQSKAFESALATYDQDSPDRWYNVARAVGGTTPDEAKRQYELLVRDIESIENGHVAFPNYKTNGGSTKGRLRDEEKRMRSMKLQ

SEQ ID NO: 19 - DNA, 240 bp, Brassica napus
atggcttccaactccatgagttctaacgcgtcttggacacgtaaggagaacaaactatttgaaagggctttggctatatatgaccaggacactcctgaccgttggcataacgttgctagagcagttggtgggaaatcagctgaagaagtaaggcgacactacgagctactcattagggatgtcaatgacatcgagtcagggcgttatccacagcctacttaccgttcgaatggaaactga

SEQ ID NO: 20 - protein, 79 aa, Brassica napus
MASNSMSSNASWTRKENKLFERALAIYDQDTPDRWHNVARAVGGKSAEEVRRHYELLIRDVNDIESGRYPQPTYRSNGN

SEQ ID NO: 21 - DNA, 297 bp, Brassica napus
tttatagcactattgcttcaatgtaacagacttcactggatcctcatattcttcattaacctcaaatcgtaatcgttgatgcctcttgatttatttccaacatcgacggtcttgtatttaggcaaagggactaagtcttgctcgatgttcatgagatcttcaacgagaatatcgtagtgacgtttgacttcctctgccgatttattcccgactgctttggccacgttttgccaacggtctggagtgtctttgtcgtaaacggctaaagccctttcgaacatcttattttgcttagac

SEQ ID NO: 22 - protein, 98 aa, Brassica napus
MASSSMSSSWTSKQNKMFERALAVYDKDTPDRWQNVAKAVGNKSAEEVKRHYDILVEDLMNIEQDLVPLPKYKTVDVGNKSRGINDYDLRLMKNMRIQ

SEQ ID NO: 23 - DNA, 297 bp, Brassica napus
atggcctcaagttctatgagctcctcttggacgtctaagcaaaataagatattcgaaagggctttagccgtttacgacaaagacactccagaccgttggcaaaacgtggccaaagccgtcgggaataaatcggcagaggaagtcaaacgtcactacgatattctcgttgaagatctcatgaacatcgagcaagacttagtccctttgcctaaatacaagaccgtcgatgttggaaataaatcaagaggcatcaacggttacggtttgaggttaatgaaaaatattgaggtccagtga

SEQ ID NO: 24 - protein, 98 aa, Brassica napus
MASSSMSSSWTSKQNKIFERALAVYDKDTPDRWQNVAKAVGNKSAEEVKRHYDILVEDLMNIEQDLVPLPKYKTVDVGNKSRGINGYGLRLMKNIEVQ

SEQ ID NO: 25 - DNA, 237 bp, Capsicum annuum
atggcatcaaattcactcagtgcttggaccccaagagaaaacaagaaattcgagcaggcacttgctgtgtatgataaggatacacctgatcgctggcaaaacattgctagatacgttggtggaaaatcagttgaagaagttaaacatcactatgctatccttgtggaggatctcaaacacattgagtctggcgacgtcccattcccaaaatacaagtcagatggaaagtctcgttaa

SEQ ID NO: 26 - protein, 78 aa, Capsicum annuum
MASNSLSAWTPRENKKFEQALAVYDKDTPDRWQNIARYVGGKSVEEVKHHYAILVEDLKHIESGDVPFPKYKSDGKSR

SEQ ID NO: 27 - DNA, 261 bp, Citrus clementina
atggcatccaacactatgacttcttcacgcagctctggctcatcctggactgtcaaacagaacaaacaattcgagacagctctggccttttatgacaaggacacccctgaccgctgggacaatgttgctaaggctgttagcggcaaaacagtcgaagacgtcaagaaacattatgaactgctcgttaaggatatcaatgacattgaagctggcaggtatccccaccccaactatcgctctactactggaaccggaaactga

SEQ ID NO: 28 - protein, 86 aa, Citrus clementina
MASNTMTSSRSSGSSWTVKQNKQFETALAFYDKDTPDRWDNVAKAVSGKTVEDVKKHYELLVKDINDIEAGRYPHPNYRSTTGTGN

SEQ ID NO: 29 - DNA, 249 bp, Cichorium intybus
atggcatctagctcaatgtcttcacgtgggtcaggatcatggacggctaaacagaacaaggcctttgagaaggctttggctgtatttgacaaagatacccctgaccgctggcataatgttgccaaggctgttggtggaaaaacagcagaggaagtgaagcaccattatgaagttcttgtagaagatgtgaagcatattgagaatggtcgagttccattccctaattacaggacgactggaggggcataa

SEQ ID NO: 30 - protein, 82 aa, Cichorium intybus
MASSSMSSRGSGSWTAKQNKAFEKALAVFDKDTPDRWHNVAKAVGGKTAEEVKHHYEVLVEDVKHIENGRVPFPNYRTTGGA

SEQ ID NO: 31 - DNA, 240 bp, Centaurea maculosa
atggcatcaaactccctctattcaagcagctccagctcctcgtggacacctcagcagaacaagctatttgaaagagcccttgcagtgtatgatagagatacccctgaccgttggcagaagattgcaagggcagtgggtggcaaatctgcagaagaagtgaagaggcactatgaagtgctcattgaagacctcaggcacatagagtctggcaatgttccttttcctaactacagacgctaa

SEQ ID NO: 32 - protein, 79 aa, Centaurea maculosa
MASNSLYSSSSSSSWTPQQNKLFERALAVYDRDTPDRWQKIARAVGGKSAEEVKRHYEVLIEDLRHIESGNVPFPNYRR

SEQ ID NO: 33 - DNA, 261 bp, Citrus sinensis; identical to SEQ ID NO: 27

SEQ ID NO: 34 - protein, 86 aa, Citrus sinensis; identical to SEQ ID NO: 28

SEQ ID NO: 35 - DNA, 243 bp, Eucalyptus grandis
atggcatcgaattctctgacttcttcatcctggacgccgaagcagaacaagatgttcgagaaggcattggctcaatatgacaaggacactcccgacaggtggcagaagattgccaaggccgtgggtgggaaatctgcagatgaagtgaaaagacactatgaaattttaatcgaggacgtcaagcacatcgagtctggcagagttccttttcctaattacaggtcgagcaacaatagtggctga

SEQ ID NO: 36 - protein, 80 aa, Eucalyptus grandis
MASNSLTSSSWTPKQNKMFEKALAQYDKDTPDRWQKIAKAVGGKSADEVKRHYEILIEDVKHIESGRVPFPNYRSSNNSG

SEQ ID NO: 37 - DNA, 309 bp, Eucalyptus gunnii
atgggtgaatttcccaatgggtggagttgggaagagaacaagctgtttgaggtggctctggcgatggtggatgaacaagacccagatcggtgggaggtggtcgcggccattgtcggagggaagaagagtgcagaggaagtgcagagacattatgtaatccttctggaggatttgcacttcattgaatctgggtgtcttgatcacgagctggaggatgctcagtcatatggtcaagttgagtgtattaatcagtcagtgtattggacagacgaggatcaggaattgttcattcagttggacataaactga

SEQ ID NO: 38 - protein, 102 aa, Eucalyptus gunnii
MGEFPNGWSWEENKLFEVALAMVDEQDPDRWEVVAAIVGGKKSAEEVQRHYVILLEDLHFIESGCLDHELEDAQSYGQVECINQSVYWTDEDQELFIQLDIN

SEQ ID NO: 39 - DNA, 258 bp, Eucalyptus gunnii
atggcatccagttcaatgtcgaggggttcgagctcgtggacggcgaagcagaacaaggcgtttgaggaggcactggcggtgtacgacaaggacacgccagaccgctggcacaatgtggccaaagccgtgggtggcaaaactgctgaggaggtgaagaggcattatgagttgcttgtggaggatgtgaagcatattgagtctggccgagtccctttccctaattacaggacaaccgggcggggaaacgttaatggatga

SEQ ID NO: 40 - protein, 85 aa, Eucalyptus gunnii
MASSSMSRGSSSWTAKQNKAFEEALAVYDKDTPDRWHNVAKAVGGKTAEEVKRHYELLVEDVKHIESGRVPFPNYRTTGRGNVNG

SEQ ID NO: 41 - DNA, 240 bp, Eucalyptus tereticornis
atgggtgaatttcccaatgggtggagttgggaagagaacaagctgtttgaggtggctctggcgatggtggatgaacaagacccagatcggtgggaggtggtcgcggccattgtcggagggaagaagagtgcaaaggaagtgcagagacattatgtaatccttctggaggatttgcacttcattgaatctgggtgtcttgatcaccaactggaggatgctcaatcatatggtcaaagttga

SEQ ID NO: 42 - protein, 79 aa, Eucalyptus tereticornis
MGEFPNGWSWEENKLFEVALAMVDEQDPDRWEVVAAIVGGKKSAKEVQRHYVILLEDLHFIESGCLDHQLEDAQSYGQS

SEQ ID NO: 43 - DNA, 288 bp, Festuca arundinacea
atggcgtcgatgtcggtgaactcgacgaggccgcagtggacggcgaagcagaacaagcagttcgagcaggcgctggcggtgtacgacaaggagacgccggaccggtggcacaacatcgcgcgcgccgtgggtggcaagtccgccgacgaggtcaggcgctactacgagctgctcgtagaggacgtcaagcgcatcgaggccggcagggtgcccttcccggcgtacaggtgccccggcgccgccatgggcgggtacgaggccgacaggctgaagcacctgaagatctag

SEQ ID NO: 44 - protein, 95 aa, Festuca arundinacea
MASMSVNSTRPQWTAKQNKQFEQALAVYDKETPDRWHNIARAVGGKSADEVRRYYELLVEDVKRIEAGRVPFPAYRCPGAAMGGYEADRLKHLKI

SEQ ID NO: 45 - DNA, 246 bp, Fragaria vesca
atggcatccaactcactctcttcacgaagctcgagctcctcatggactcctaagcagaacaaacagttcgaaaaggcactagccttgtacgacaaggatacccctgaccgctggcagaaggtggccagagccgtgggagggaagtccgcggaggaggtgaagaggcactatgagattctcattgaggatgtcaagcacattgagtctggtagaatcccatatcctgattacaggaacagtgactaa

SEQ ID NO: 46 - protein, 81 aa, Fragaria vesca
MASNSLSSRSSSSSWTPKQNKQFEKALALYDKDTPDRWQKVARAVGGKSAEEVKRHYEILIEDVKHIESGRIPYPDYRNSD

SEQ ID NO: 47 - DNA, 246 bp, Gossypium hirsutum
atgtcatcgaattcaatgtctgcttcatggacagccaagcaaaacaaagatttcgaaagggctttagctgtttacgacaaggacacaccagatcgttggtacaatgttgctaaagctgtgggagggaaaactgttgaggaagtgaagaagcactatgagcttcttctggaagatgttagacacatcgagtcgggtcgggttcctttccccgactattggaccgttaccgggaatcgtcaagcatga

SEQ ID NO: 48 - protein, 81 aa, Gossypium hirsutum
MSSNSMSASWTAKQNKDFERALAVYDKDTPDRWYNVAKAVGGKTVEEVKKHYELLLEDVRHIESGRVPFPDYWTVTGNRQA

SEQ ID NO: 49 - DNA, 258 bp, Gossypium hirsutum
atggcatcctctattacgctttcacgtgattctaactcctactggactccaaagcaaaacaagctatttgaaagggcacttgctgtatatgacaaggacactccagaccgctggcaaaaggtggctgcagctgtgggggagaaatcagtcgaggaagtaagaaggcattatgagatcctagtgagggatctcatgtatatagaatctggtcaaatccctatacccaattacaaaagcactgggagtaacagaagatga

SEQ ID NO: 50 - protein, 85 aa, Gossypium hirsutum
MASSITLSRDSNSYWTPKQNKLFERALAVYDKDTPDRWQKVAAAVGEKSVEEVRRHYEILVRDLMYIESGQIPIPNYKSTGSNRR

SEQ ID NO: 51 - DNA, 252 bp, Gossypium hirsutum
atgtcatccaattttctcaataattcacgctgctctagctcttcctggacacctaaacaaaacaaaacgttcgagaaggctctggctaaatatgaccagtacactcctgaccgctgggacaatgttgccaaagctgtgggtggaaagtctgctgaggaagacaagctgcactatgatgccctagtcagggatctcagagacattgagtctggccgctacccttatccatatgcaagtggaagcaacagctaa

SEQ ID NO: 52 - protein, 83 aa, Gossypium hirsutum
MSSNFLNNSRCSSSSWTPKQNKTFEKALAKYDQYTPDRWDNVAKAVGGKSAEEDKLHYDALVRDLRDIESGRYPYPYASGSNS

SEQ ID NO: 53 - DNA, 261 bp, Gossypium hirsutum
atggcatcaagctcaatgtcgtcccaaggttctagttcatggacagccaaacaaaacaaagattttgaaaaagttttggctgtttatgacaaggacacacctgaccgttggtacaatgttgccaaggctatcggagggaaaaccgcggaggaagtgaagaggcactatgaactgcttgtgaaagatgtgaagcaaattgaatcaggcaaagtgccattccctaactataggaccactggtggcagcaacacccaaggatga

SEQ ID NO: 54 - protein, 86 aa, Gossypium hirsutum
MASSSMSSQGSSSWTAKQNKDFEKVLAVYDKDTPDRWYNVAKAIGGKTAEEVKRHYELLVKDVKQIESGKVPFPNYRTTGGSNTQG

SEQ ID NO: 55 - DNA, 282 bp, Gossypium hirsutum
atggcctcaggttcgagctggacaccaaagcaaaacaagttgttcgagaatgctttagttatctacgacaaagataccccagaccgctggcacaatctagccagggcagttggagggaaaaccgtggaggaagtgaagctacattaccagaaccttgtcgaagacatccaacagattgagtctggccaagtgcccttacctccttacaagaaagctggagggaacaaaggatacaatttcacggatggagaacaaagaatgaggaatctgaggcttcagtga

SEQ ID NO: 56 - protein, 93 aa, Gossypium hirsutum
MASGSSWTPKQNKLFENALVIYDKDTPDRWHNLARAVGGKTVEEVKLHYQNLVEDIQQIESGQVPLPPYKKAGGNKGYNFTDGEQRMRNLRLQ

SEQ ID NO: 57 - DNA, 243 bp, Gossypium hirsutum
atggcatcgagctcaatgtcgtcccgtggttcaggttcatggacagccaaacaaaacaaagactttgaaagggctttggctgtgtatgataaggacacccctgaccgttggtacaatgttgccaaagctgttggtgggaaaactgctgaggaagttaagaggcactatgagctgcttgtggctgatgtcaagtatattgaatcaggccaagttcccttcccttacaggtccaatggaaattag

SEQ ID NO: 58 - protein, 80 aa, Gossypium hirsutum
MASSSMSSRGSGSWTAKQNKDFERALAVYDKDTPDRWYNVAKAVGGKTAEEVKRHYELLVADVKYIESGQVPFPYRSNGN

SEQ ID NO: 59 - DNA, 264 bp, Gossypium hirsutum
atggcatcgaactttttcacttcttcacgtgcttccaactcctactggacgccttaccaaaacaagctatttgagaaggcactagcagtatatgacaaggacacccctgaccggtggcaaaaagtggcggctgctgtgggcgagaaatcggccgaggaagtaagaaagcactatgaggtcctagtggaagatctcatgtatattgaatctggtaaaatacctatacccaattacaaaagcactgctgggagttacagaagatga

SEQ ID NO: 60 - protein, 87 aa, Gossypium hirsutum
MASNFFTSSRASNSYWTPYQNKLFEKALAVYDKDTPDRWQKVAAAVGEKSAEEVRKHYEVLVEDLMYIESGKIPIPNYKSTAGSYRR

SEQ ID NO: 61 - DNA, 315 bp, Gossypium hirsutum
atggataagttccctgatgttctgtgtggttggagctgggaggagaacaagttgtttgagctggctttagcagtggtcgatgaacaacaccctgatcgttgggaagtggtagccagcatggttggaggggaaaaaactgcagaagatgtgcataaacattatgtcatacttttggaggatttgcagtttatcgaatcgggtaaactcgaccataaacttgccgaaactcagtcctgtattcaactggactgcactcaatctgtatgctggactgatgatgataacaacttgctggttcgattagacataaattga

SEQ ID NO: 62 - protein, 104 aa, Gossypium hirsutum
MDKFPDVLCGWSWEENKLFELALAVVDEQHPDRWEVVASMVGGEKTAEDVHKHYVILLEDLQFIESGKLDHKLAETQSCIQLDCTQSVCWTDDDNNLLVRLDIN

SEQ ID NO: 63 - DNA, 261 bp, Gossypium hirsutum
atgtcgtcaagttctaggacttcttcacgtgattctaactcctactggactccaaagcaaaacaaactgtttgaaaaggcccttgctgtatatgacagggacactccggaccgctggcaaaaagtggcagcggctgttggtgataaaacacccgaggaagtgcgaaggcactatgagatcttagtgacggatgtcaaccatattgaatctggtcaaatccctatacccgattatgaaagcactgggaacaacagtagatga

SEQ ID NO: 64 - protein, 86 aa, Gossypium hirsutum
MSSSSRTSSRDSNSYWTPKQNKLFEKALAVYDRDTPDRWQKVAAAVGDKTPEEVRRHYEILVTDVNHIESGQIPIPDYESTGNNSR

SEQ ID NO: 65 - DNA, 210 bp, Glycine max
atggcatcatcttggacgccaaggcaaaacaaactatttgaagaggcccttgctatacatgatagggaaactcctgacaggtggcagaatgtggcaagagtagtgggaaaatccgttgaggatgttaaaagacactatgaaatcctcaaagaagatatcaagcgaattgagcgtggtcaaattccattacctaactatacaggttcttga

SEQ ID NO: 66 - protein, 69 aa, Glycine max
MASSWTPRQNKLFEEALAIHDRETPDRWQNVARVVGKSVEDVKRHYEILKEDIKRIERGQIPLPNYTGS

SEQ ID NO: 67 - DNA, 285 bp, Glycine max
atgacatcctacacactttcttctcctaacaccagtctaagatggacaactgagaagaacaaactgtttgagaatgccttggcaatatatgacaaggatacccctgagcgttggaacaacatagccatgtttgttggaggcacaactgaagttgaagtcaagagacaatatgagatactcctagaggacatcaaaaacattgaatcgggcaaggttccactccctgattacacgagaaatgctggatgtggcaaactaaacatcagcagtgcagaacaaaggtga

SEQ ID NO: 68 - protein, 94 aa, Glycine max
MTSYTLSSPNTSLRWTTEKNKLFENALAIYDKDTPERWNNIAMFVGGTTEVEVKRQYEILLEDIKNIESGKVPLPDYTRNAGCGKLNISSAEQR

SEQ ID NO: 69 - DNA, 222 bp, Glycine max
atggcatcatcttggaccccaaggcaaaacaaactgtttgaaagagccctggctaaatatgatagagaaaccccagataggtggcagaatgttgccaacgaggtgggaaaatcggtagaggaggttaaaaggcactatgagatcctcaaagaagatatcagacgcattgagcgtggtcaagtggcattcccctacagaacaagcaattctaacagtaattaa

SEQ ID NO: 70 - protein, 73 aa, Glycine max
MASSWTPRQNKLFERALAKYDRETPDRWQNVANEVGKSVEEVKRHYEILKEDIRRIERGQVAFPYRTSNSNSN

SEQ ID NO: 71 - DNA, 222 bp, Glycine max
atggcatcatcttggactccacggcagaacaaattgtttgaacaagccctggctttatatgacagggaaacccctgacagatggcagaatgtggccaatgtggtgggaagatcagttgaggatgttaaaaggcactatgagatcctcaaagaagatgtcaaacgcattgaacatggccaagttccatttcctcgttacaaaaccaacaccagcaacaactaa

SEQ ID NO: 72 - protein, 73 aa, Glycine max
MASSWTPRQNKLFEQALALYDRETPDRWQNVANVVGRSVEDVKRHYEILKEDVKRIEHGQVPFPRYKTNTSNN

SEQ ID NO: 73 - DNA, 282 bp, Glycine max
atggcatcaagctcaatgtcagctactggatcatggagtgctaaggacaacaaggcctttgaaagggctttagctgtttatgacaaggacaccccggaccgttggaaagatgttgcccgtgctgttggcgggaaaactcctgatgaagtgaagagccactatgagctcctcctcagagacattagccaaattgaatcaggcaaagtgccatacccaaattacaagaaaagtgcagagcatgatgaagaggagaaaaggatgagaaacctgaagatccagtga

SEQ ID NO: 74 - protein, 93 aa, Glycine max
MASSSMSATGSWSAKDNKAFERALAVYDKDTPDRWKDVARAVGGKTPDEVKSHYELLLRDISQIESGKVPYPNYKKSAEHDEEEKRMRNLKIQ

SEQ ID NO: 75 - DNA, 318 bp, Glycine max
atggcttcaaactcccacaacaataacaaggaaattttttcctcttggacacgcatgcagaacaagcaattcgaaagcgcacttgccttgtatgatcaagacaccccagatcgatggcaaaacatagcaaaagtggttggtgataaatcggctgaggaagtgaagagacactatgaaatccttttggaggaccttaggcatatagagtctggacgtgttccaattcccagctataagtccacagataataatcaagagagggagatgaatgctaaagattgtaataagaaaactacatatttatacttgaaaaactaa

SEQ ID NO: 76 - protein, 105 aa, Glycine max
MASNSHNNNKEIFSSWTRMQNKQFESALALYDQDTPDRWQNIAKVVGDKSAEEVKRHYEILLEDLRHIESGRVPIPSYKSTDNNQEREMNAKDCNKKTTYLYLKN

SEQ ID NO: 77 - DNA, 294 bp, Glycine max
atggcatccagttcaatctcagcctctggctcatggagtgttaaggacaacaaggcctttgaaaaggctttagctgtttatgacaaggacactcctgaccgttggtacaatgttgctcatgctgttggtggcaaaactccagaggaagtgaaaaggcactacgaactccttgttcaggatgttaagcatattgagtctggacgtgtgccattcccaaattacaagaaaactacttcagggtcaactgatcaggaggaaaaaaggctgaggaatttgaatttgaacctccagtga

SEQ ID NO: 78 - protein, 97 aa, Glycine max
MASSSISASGSWSVKDNKAFEKALAVYDKDTPDRWYNVAHAVGGKTPEEVKRHYELLVQDVKHIESGRVPFPNYKKTTSGSTDQEEKRLRNLNLNLQ

SEQ ID NO: 79 - DNA, 279 bp, Glycine max
atggcatctagctcaatgtcatccactggctcatggagtaccaaggacaacaaggccttcgaaagggctctagctgtgtatgacaaggacactcccgaccgttggtacaatgttgctaaggctgttggaggagggaagactccagaggaagtgaagaggcactatgagctccttctcagggatgttaggtacattgaatcagggaaagtgccattcccatacaagcaaagtggagggtctgaagaagagaaaaggctgagaaacatgaagctccagtga

SEQ ID NO: 80 - protein, 92 aa, Glycine max
MASSSMSSTGSWSTKDNKAFERALAVYDKDTPDRWYNVAKAVGGGKTPEEVKRHYELLLRDVRYIESGKVPFPYKQSGGSEEEKRLRNMKLQ

SEQ ID NO: 81 - DNA, 429 bp, Glycine max
atggcctcaagtcagggttggactccgaagcagaacaagagatttgagaatgcccttgccatcttcgacaaggacaccccagacaggtggcacacggtggccagggccgtcggaggaaaaacggtggaggaagtgaaaaggcattatgagaagctcgtggaagatgtgaaggagattgaggaaggtcacgtgcccctccccaattaccgaagtgctgcaagaggccacgttaattattaccataatattagtccaatgcaaatcactttaaacataaaagtgagaaggctatttcacacaaaattggcactccatgctgacgaaatcaaccagacaacttttggaatgctgaagtttcgaatggagtattcttatattaaaattgtatccattcttaatctatatactttagaaaaatatactttttaa

SEQ ID NO: 82 - protein, 142 aa, Glycine max
MASSQGWTPKQNKRFENALAIFDKDTPDRWHTVARAVGGKTVEEVKRHYEKLVEDVKEIEEGHVPLPNYRSAARGHVNYYHNISPMQITLNIKVRRLFHTKLALHADEINQTTFGMLKFRMEYSYIKIVSILNLYTLEKYTF

SEQ ID NO: 83 - DNA, 279 bp, Glycine max
atggcatctagctcaatgtcatccactggctcatggagtgccaaggacaacaaagcctttgaaagggctctagctgtgtatgacaaggacacgccggaccgttggtacaatgttgctaaggctgttgctgttgggaagactcctgaggaagtcaagaggcactatgaactcctccttagggatgttaggcacattgaatcagggcaagtgccattcccatacaagcaaaatggagggtctcaagaggagaaaaggctgagaaacatgaagctccagtaa

SEQ ID NO: 84 - protein, 92 aa, Glycine max
MASSSMSSTGSWSAKDNKAFERALAVYDKDTPDRWYNVAKAVAVGKTPEEVKRHYELLLRDVRHIESGQVPFPYKQNGGSQEEKRLRNMKLQ

SEQ ID NO: 85 - DNA, 393 bp, Glycine max
atggcgtcaagctctctcagcaaacaaaaggcttctgactcctcttggacaccaaaacagaacaagctgtttgaaaaagcacttgcaaaatatgacaaggatacccctgaccgatggcagaatgtagccaaagcagtaggtggaaaatctgcagatgaagttaagagacactatgaaatcctcttggaggatctgagacacattgagtctggtcatgttcctcttcccaagtacaagtccacaggaagcagcaccaatgttgaggaagaagagagaaaggaaaagaagagaccactaactaaaatcattgacaccttttttcaatttttgaatgtttttacacgtcactttcaaaattccacactcaattatttagttacctattcaatttga

SEQ ID NO: 86 - protein, 130 aa, Glycine max
MASSSLSKQKASDSSWTPKQNKLFEKALAKYDKDTPDRWQNVAKAVGGKSADEVKRHYEILLEDLRHIESGHVPLPKYKSTGSSTNVEEEERKEKKRPLTKIIDTFFQFLNVFTRHFQNSTLNYLVTYSI

SEQ ID NO: 87 - DNA, 294 bp, Glycine max
atggcctcaagctcagcttggacaacaaagcagaacaaaaagtttgagaatgctttggccatctacgacagggatacccccgatcggtggcagaacttggccagggcggtgggaggtaagactgtggaggaagtgaaaaggcactatgagatgctcgttgatgatttgaagcagattgaagaaggtcacgtgcccttgcccaattacagaaatgctgctgcaacaggaggaggcagcatcagaggttatagttacatggatgaagaacaaaggttgaaatcaaatttttattga

SEQ ID NO: 88 - protein, 97 aa, Glycine max
MASSSAWTTKQNKKFENALAIYDRDTPDRWQNLARAVGGKTVEEVKRHYEMLVDDLKQIEEGHVPLPNYRNAAATGGGSIRGYSYMDEEQRLKSNFY

SEQ ID NO: 89 - DNA, 222 bp, Glycine max
atggcatcatcttggaccccaaggcaaaataaacaatttgaaagagccctggctaaatatgatagagaaaccccagatagatggcagaatgttgctaacgaggtgggaaaatcggttgaggaggttaaaaggcactatgagatcctcaaagaagatatcagacgcattgagcgtggtcaagtggcattcccctacagaacaaacaattctaacagtaattaa

SEQ ID NO: 90 - protein, 73 aa, Glycine max
MASSWTPRQNKQFERALAKYDRETPDRWQNVANEVGKSVEEVKRHYEILKEDIRRIERGQVAFPYRTNNSNSN

SEQ ID NO: 91 - DNA, 267 bp, Glycine max
atggcttcaaattccttgaacaatagtaacaacaaagaacattttccctcttggaccagattgcagaacaaacaatttgaaaaggcattggtcttgtacgatgaacacacccgagatcggtggcaaaatatagctaaagaagttggcaataaatcggtggaggaagtgaagagacactatgcaattcttttagaagatcttagtagaatggagtcagggcgtgttccaattcctgattataagttctcagaaaacatggatatatga

SEQ ID NO: 92 - protein, 88 aa, Glycine max
MASNSLNNSNNKEHFPSWTRLQNKQFEKALVLYDEHTRDRWQNIAKEVGNKSVEEVKRHYAILLEDLSRMESGRVPIPDYKFSENMDI

SEQ ID NO: 93 - DNA, 282 bp, Helianthus argophyllus
atggcatcaagttctatgacgtcttcacgtagctccgggtccacatggacacagaggcaaaacaagcagtttgaagaggctttagcttactacaacaaggacagtcccgacaggtggcacaacattgctagggctgttggtggaaagtcagttgaggaggtgaagaggcattatgaaatccttgtgagggacatcatgcagattgaatcagatcaagttcctttacctaactatcgcagtattggaagcaacgggcgtggattcgcaaacgaacaaaggtag

SEQ ID NO: 94 - protein, 93 aa, Helianthus argophyllus
MASSSMTSSRSSGSTWTQRQNKQFEEALAYYNKDSPDRWHNIARAVGGKSVEEVKRHYEILVRDIMQIESDQVPLPNYRSIGSNGRGFANEQR

SEQ ID NO: 95 - DNA, 234 bp, Helianthus exilis
atgtcttcacgtgggtcaggttcatggactgtgaagcagaataaggactttgaagaggctttggctgtgtttgacaaagacacccctgaccgctggcgcaatgttgcaaaggctgtcggtgggaagaccgcagaggaagtgaagaggcattatgaaatcctagtgggggatgtgaaactcattgagagcggtcgagttcctttccccaattataggaccactaatggggcatga

SEQ ID NO: 96 - protein, 77 aa, Helianthus exilis
MSSRGSGSWTVKQNKDFEEALAVFDKDTPDRWRNVAKAVGGKTAEEVKRHYEILVGDVKLIESGRVPFPNYRTTNGA

SEQ ID NO: 97 - DNA, 261 bp, Hordeum vulgare
atggcctggagcgacgcagagaacgagaggttcgagcgcgcgctggccacgtacggccgcgacacagccggtctctgggagcgcgtggcggcagcggtcggcggcggcaagacggccgacgacgtcaggcgccactacgacctgctgacgcaggacatcggcgacatcgagtccggccgctacggttaccccaacggcggagccaacagcagcaccaaccccaacaacggcaggaacagggccaaccggccccagacatga

SEQ ID NO: 98 - protein, 86 aa, Hordeum vulgare
MAWSDAENERFERALATYGRDTAGLWERVAAAVGGGKTADDVRRHYDLLTQDIGDIESGRYGYPNGGANSSTNPNNGRNRANRPQT

SEQ ID NO: 99 - DNA, 255 bp, Hordeum vulgare
atgtcttctgggtctacgagctcatcccgtggcggcgccaacgcggtgtggagcgtcagggagaacaagctgttcgaggaggcactcgccaactacggcgagggcacgcccgaccgctggcacaaggtgtcgcgcgccatgggcgggaccaagacggccgacgaggtgcgcaaccactatgagatcctcgaggaagacatcaagctcatcgagtctggcagggtcccgttccccaagtacaagtacaggaactga

SEQ ID NO: 100 - protein, 84 aa, Hordeum vulgare
MSSGSTSSSRGGANAVWSVRENKLFEEALANYGEGTPDRWHKVSRAMGGTKTADEVRNHYEILEEDIKLIESGRVPFPKYKYRN

SEQ ID NO: 101 - DNA, 255 bp, Ipomoea batatas
atggcctctaattccctgtcgtcgcgtggcgccggcgcgtcatcatgcactgccgacctaaacaaacaattcgaggaggctcttgcccgccacgaccgcgacacgcctgaccgctggcaaaacattgccagggaagtcggcaaatcacccgccgaggtcaagcacctctacgacatcctcgtacacgaccttaaacacatcgagtctggggacgtccctgtcccaaactacaggtccaccggaacccgccgttga

SEQ ID NO: 102 - protein, 84 aa, Ipomoea batatas
MASNSLSSRGAGASSCTADLNKQFEEALARHDRDTPDRWQNIAREVGKSPAEVKHLYDILVHDLKHIESGDVPVPNYRSTGTRR

SEQ ID NO: 103 - DNA, 252 bp, Ipomoea nil
atggcgtcagattccctgtcgtcgcgtgcctcatcatcatggactgccgaccaaaacaaacaattcgaggaggctcttgcccgccacgaccgcgacacgcctgaccgctggcaaaacattgccagggaagtcggcaaatcaccagccgaggtcaagcaactctacgacatcctcgtacacgaccttaaacacatcgagtctggggacgtccctgtcccaaactacaggtccaccggaacccgccgccgttga

SEQ ID NO: 104 - protein, 83 aa, Ipomoea nil
MASDSLSSRASSSWTADQNKQFEEALARHDRDTPDRWQNIAREVGKSPAEVKQLYDILVHDLKHIESGDVPVPNYRSTGTRRR

SEQ ID NO: 105 - DNA, 303 bp, Lactuca perennis
atggcatcaggctctatgacatcttcacgtagctctggatcttcctggactccaagacaaaacaagcagtttgaagatgctttagcttactacaacaaggacactcctgatcgctggcataacattgccagggctgtcggtggaaaatcagtggaggaggtgaagaggcattatgaaatcctcgagagggatgtcatgcaaattgaattagatcaagttcctttacccaattatagggatattggaagcaacggacgtggatttggaaatgaacagaggcttctgaagaatctaaagctataa

SEQ ID NO: 106 - protein, 100 aa, Lactuca perennis
MASGSMTSSRSSGSSWTPRQNKQFEDALAYYNKDTPDRWHNIARAVGGKSVEEVKRHYEILERDVMQIELDQVPLPNYRDIGSNGRGFGNEQRLLKNLKL

SEQ ID NO: 107 - DNA, 252 bp, Lactuca sativa
atggcatctagctcaatgtcttcacgtgggtcgggttcatggactgctaaacagaacaaagcctttgagaaggctttggctgtgtttgacaaagatacccctgatcgatggcataatgtagccaaagctgttggtggcaaaacagctgaggaagtgaagcagcattatgaagtccttgtggaggatgtgaagcacattgaaaatggtcgagttcctttccctaattacaggagaaccaccggagggggatag

SEQ ID NO: 108 - protein, 83 aa, Lactuca sativa
MASSSMSSRGSGSWTAKQNKAFEKALAVFDKDTPDRWHNVAKAVGGKTAEEVKQHYEVLVEDVKHIENGRVPFPNYRRTTGGG

SEQ ID NO: 109 - DNA, 252 bp, Lactuca serriola
atggcatctagctcaatgtcttcacgtgggtcgggttcatggactgctaaacagaacaaagccttcgagaaggctttggctgtgtttgacaaagatacccctgatcgatggcataatgtagccaaagctgttggtggcaaaacagctgaggaagtgaagcagcattatgaagtccttgtggaggatgtgaagcacattgaaaatggtcgagttcctttccctaattacaggagaaccaccggagggggatag

SEQ ID NO: 110 - protein, 83 aa, Lactuca serriola; identical to SEQ ID NO: 108

SEQ ID NO: 111 - DNA, 252 bp, Lactuca virosa; identical to SEQ ID NO: 107

SEQ ID NO: 112 - protein, 83 aa, Lactuca virosa; identical to SEQ ID NO: 108

SEQ ID NO: 113 - DNA, 240 bp, Musa acuminata
atggcatccggttcgatgagctcctcctggaccgcgaaggagaacaagatgttcgagaaggcactggcggtgtacgacagggacacccccgaccgctggcacaagatcgcccgggccatcggcgggaagacggcggacgaagtgaagcgctactacgacctgctcgtggaggacgtgcgccgcatcgaggctggccaaatgccgtacgccaattaccggtcctctaatggcagaggttga

SEQ ID NO: 114 - protein, 79 aa, Musa acuminata
MASGSMSSSWTAKENKMFEKALAVYDRDTPDRWHKIARAIGGKTADEVKRYYDLLVEDVRRIEAGQMPYANYRSSNGRG

SEQ ID NO: 115 - DNA, 309 bp, Malus domestica
atggcatcaagctcaatgtcctcaagaggctctggctcctcctggactgccaagcaaaacaaagcctttgaaaaggctctggctgtctacgacaaggacactgctgaccgctggtacaatgtggccaaagcggtcggcggcaaaacaccggaggaagtcaagaggcactatgaggttcttgtggaagatgtcaagcatattgagtcaggccaggtgcccttcccagattacaggactactggtgggaacagccatggccaccacatgagtgatgaggaaaagaggatgagaaacctcaagcttcactga

SEQ ID NO: 116 - protein, 102 aa, Malus domestica
MASSSMSSRGSGSSWTAKQNKAFEKALAVYDKDTADRWYNVAKAVGGKTPEEVKRHYEVLVEDVKHIESGQVPFPDYRTTGGNSHGHHMSDEEKRMRNLKLH

SEQ ID NO: 117 - DNA, 309 bp, Malus domestica
atggcatcggtttcttcctcgaggaatttcaactcctcgtggacgccgaaggagaacaagctgttcgagaaggcgctggccgtgtacgacaaggacacgcaggaccgctggcataatgtggccaaggccgtcggcggaaaatctgcggaggaagtaaagaggcactacgagattctggtgcatgatctcatgcacatagaatccggccatgtccctataccaaattataagtccgccggcggcagcggcagcggcagcaacagaggatttggtgacgagcagaggcttatgaaaaatttgaagatctga

SEQ ID NO: 118 - protein, 102 aa, Malus domestica
MASVSSSRNFNSSWTPKENKLFEKALAVYDKDTQDRWHNVAKAVGGKSAEEVKRHYEILVHDLMHIESGHVPIPNYKSAGGSGSGSNRGFGDEQRLMKNLKI

SEQ ID NO: 119 - DNA, 258 bp, Manihot esculenta
atgtcttcaagctacctcgcttcaagctccttttggtctccatccgaaaacaaactgtttgaggaggccctagccttgtatgataaggaaacaccagatcgctgggaaaatatagccagagctgttgggggcaaatcagcagatgaagtcaagagacactacgagatccttcttgaagatgttaagcacatcgagtctggtcgtgttccctttcctaactataaattatctggtggaagcccaagcaatggtaattaa

SEQ ID NO: 120 - protein, 85 aa, Manihot esculenta
MSSSYLASSSFWSPSENKLFEEALALYDKETPDRWENIARAVGGKSADEVKRHYEILLEDVKHIESGRVPFPNYKLSGGSPSNGN

SEQ ID NO: 121 - DNA, 252 bp, Mimulus guttatus
atggcatcaagctctgcgaatcgtgactcgggaagaaaatggaccgcgaaggagaacaaagacttcgaggaggcattggccgaattcgacaaagacacacccgagcggtggtcaaacgttgctcgagcagtcggtactcgaacggtggaggaagttaagaaacactacgaagttctcctcgaagattttaataaaatcgagagtggtaaggtacccttgcccaattacaagaccacttgtggaagtttttaa

SEQ ID NO: 122 - protein, 83 aa, Mimulus guttatus
MASSSANRDSGRKWTAKENKDFEEALAEFDKDTPERWSNVARAVGTRTVEEVKKHYEVLLEDFNKIESGKVPLPNYKTTCGSF

SEQ ID NO: 123 - DNA, 276 bp, Medicago truncatula
atggcatcaatgtcagcatctggttcatggagtgctaaggacaataaagcatttgaaagggcactagctgtttttgataaagacacacctgaccgttggtccaatgttgctcaagctgttggtggtgggaagactcctgaggatgttaagagacactatgaacacctcctaagggatgttaggcacattgaatcaggtcaagttgcattcccaaattacaagaacattggaggctatgatgaggaaaaaaggttgagaaacctaaagctccagtaa

SEQ ID NO: 124 - protein, 91 aa, Medicago truncatula
MASMSASGSWSAKDNKAFERALAVFDKDTPDRWSNVAQAVGGGKTPEDVKRHYEHLLRDVRHIESGQVAFPNYKNIGGYDEEKRLRNLKLQ

SEQ ID NO: 125 - DNA, 279 bp, Medicago truncatula
atggcatctagctcaatgtcagcttctggctcatggagtgttaaggagaataaagcctttgaaagagctttagctgtttatgacaaagacacaccagatcgttggtacaatgtagctcatgctgttggtggcaaaactcctgaggaagttaagaaacactatgaacttcttgttgaggatattaaacatattgagtcagggaaagttccatttccaaattacaagaaaatttcagtgtctcatgaggagaaaaggatgaggaacatgagccttcattga

SEQ ID NO: 126 - protein, 92 aa, Medicago truncatula
MASSSMSASGSWSVKENKAFERALAVYDKDTPDRWYNVAHAVGGKTPEEVKKHYELLVEDIKHIESGKVPFPNYKKISVSHEEKRMRNMSLH

SEQ ID NO: 127 - DNA, 219 bp, Medicago truncatula
atgggatcaacttggactccaaggcaaaacaaacaatttgaaagagctttggctatatatgatagagaatctccagataagtggcagaatgttgccaacatggtgggaaaatcagttgaagatgttaaaaggcattatgaaatcctcaaagaagatgttaggcgcattgagcatggtcaagttgcattcccttacagaacaaataatgctaataactga

SEQ ID NO: 128 - protein, 72 aa, Medicago truncatula
MGSTWTPRQNKQFERALAIYDRESPDKWQNVANMVGKSVEDVKRHYEILKEDVRRIEHGQVAFPYRTNNANN

SEQ ID NO: 129 - DNA, 219 bp, Medicago truncatula
atggcaacctcttggactgcaaggcagaacaaactgtttgaacaagcattggctttatatgatagagaaactcctgaaagatggcacaatgtggccaaagtggttggaaaatcagttgaagatgttaagagtcactatgagatcctcaaagaagatgttcaacgtattgagcatggccatatcccttttcctcgttacaaaactaacaccaactcctaa

SEQ ID NO: 130 - protein, 72 aa, Medicago truncatula
MATSWTARQNKLFEQALALYDRETPERWHNVAKVVGKSVEDVKSHYEILKEDVQRIEHGHIPFPRYKTNTNS

SEQ ID NO: 131 - DNA, 294 bp, Medicago truncatula
atgacatccaagacatcatccaacatgctttcttctcctaactcaagtctacaatggacaaccaagaagaacaaactatttgaaaatgcattggcaatatatgacaaggaaacttctgaccgttggtacaatatagccatgtttgttggagggacaactgaagtggaaatcaagaagcattatgagatacttcaagaagacatcaaaaacattgagtcaggcaaagttcccctacctgcttacagaagaagaaatactggatgcagcaatgtaaacatcagcagtgcaaattaa

SEQ ID NO: 132 - protein, 97 aa, Medicago truncatula
MTSKTSSNMLSSPNSSLQWTTKKNKLFENALAIYDKETSDRWYNIAMFVGGTTEVEIKKHYEILQEDIKNIESGKVPLPAYRRRNTGCSNVNISSAN

SEQ ID NO: 133 - DNA, 276 bp, Medicago truncatula
atggcttcaagttcgaattggacaacaaagcagaacaaaagatttgagaatgcgttggcaatgttggacaaggacactcctgatctttggcagaaggtggctagagctgtgggagggaagactgttgaagaagtgaaaaggcattatgaggaccttgttgaagatgttaggcagatcgaggaaggccatgttcccctgcctaattacacaaataatgttggttacagttacataatggatcaagataaaaggatgaaggctctaagtctccactaa

SEQ ID NO: 134 - protein, 91 aa, Medicago truncatula
MASSSNWTTKQNKRFENALAMLDKDTPDLWQKVARAVGGKTVEEVKRHYEDLVEDVRQIEEGHVPLPNYTNNVGYSYIMDQDKRMKALSLH

SEQ ID NO: 135 - DNA, 246 bp, Nicotiana benthamiana
atgagctcaatgtcctcacaacatggctctggctcttggacagcaaaacagaataaggcatttgagaaggcattggctgtatatgacaaagatacttgtgatcgttggtccaatgttgccaaagctgttggaggaaaaactgctgaagaagtgaaacaacactatgaaatccttgtgcacgatgttctctatattgaaaatggtagagtgcccttccccaaatacaagactactactcgagaataa

SEQ ID NO: 136 - protein, 81 aa, Nicotiana benthamiana
MSSMSSQHGSGSWTAKQNKAFEKALAVYDKDTCDRWSNVAKAVGGKTAEEVKQHYEILVHDVLYIENGRVPFPKYKTTTRE

SEQ ID NO: 137 - DNA, 276 bp, Oryza minuta
atgtcttctgggtcaagcagctcctcccgcaacagcaacagtgtcaacatggagtcagagtggagcaaaaaggagaacaagctgttcgaggaggctcttgcctactacggcgacggcgcgcctgacctctttcacaaagtttcccgcgccatgggaggcaccaagacagccgatgaggtgcgccgccactatgagatcctcgaggacgatctcaagctgatagaggcaagaagagtcccattccccaagtacaatacacagggagcatggaactga

SEQ ID NO: 138 - protein, 91 aa, Oryza minuta
MSSGSSSSSRNSNSVNMESEWSKKENKLFEEALAYYGDGAPDLFHKVSRAMGGTKTADEVRRHYEILEDDLKLIEARRVPFPKYNTQGAWN

SEQ ID NO: 139 - DNA, 282 bp, Oryza sativa
atggcatccagctccaaggcctcgtcctcgtcgtcggcgtcggcggcgtcgtcggagtggacgaagcagcagaacaagcagttcgagcgcgccctggcggtgtacgacaccgacgccccggaccggtggcacaacgtcgcccgctacatgggcggcgccaagtccgccgaggaggtgcgccgccactacgagcggctccaggcggatgtcgagcagattgaggccggcggcgtgccgttctccttgggctacggcgccacgccacaggccggccgccgctag

SEQ ID NO: 140 - protein, 93 aa, Oryza sativa
MASSSKASSSSSASAASSEWTKQQNKQFERALAVYDTDAPDRWHNVARYMGGAKSAEEVRRHYERLQADVEQIEAGGVPFSLGYGATPQAGRR

SEQ ID NO: 141 - DNA, 258 bp, Oryza sativa
atggcgtcgatgtcggtgagctcgtcgagggcgccgcagtggacggcgaggcagaacgagcagttcgagcgggcgctggcggtgtacgacagggacacgccggagcggtggcacaacatcgcgcgcgccgttgcggggaagtccgccgacgaggtgaagctctactacgacctgctcgtggaggacgtcaagcgcatcgagaccgggaaggtgcccttccccgcgtacaggtgcccccagcccgcgattgcaggctga

SEQ ID NO: 142 - protein, 85 aa, Oryza sativa
MASMSVSSSRAPQWTARQNEQFERALAVYDRDTPERWHNIARAVAGKSADEVKLYYDLLVEDVKRIETGKVPFPAYRCPQPAIAG

SEQ ID NO: 143 - DNA, 276 bp, Oryza sativa
atgtcttctaggtcaagcagctcctcccgcaacagcaacagtgtcaacatggactcagagtggagcaaaaaggagaacaagctgttcgaggaggctcttgcctactacggcgagggcgcgcctgacctctttcacaaggtgtctcgcgccatgggaggcaccaagacagccgatgaggtgcgccgccactatgagatcctcgaggacgacctcaagctgatagaggcaagaagagtcccgttccccaagtacaatacacagggagcatggaactga

SEQ ID NO: 144 - protein, 91 aa, Oryza sativa
MSSRSSSSSRNSNSVNMDSEWSKKENKLFEEALAYYGEGAPDLFHKVSRAMGGTKTADEVRRHYEILEDDLKLIEARRVPFPKYNTQGAWN

SEQ ID NO: 145 - DNA, 306 bp, Oryza sativa
atgagttcatcctggacaacaaagcagaataaggtgtttgagagggcgctggcaatatatgacagggatacgccagatcgctggcagaatgtggcacgggcagttggtggtggaaagtcagttgatgatgtgaagaggcactatgaaaagctgatcaaggacgtggatcgcattgactctacaggaggccatcaaggatcccattacaacagctccaatgctagcagcagcagcagcagcagcagcagcaactctcggggcagtgccaatgaggaccagaggaggaggtaccacaactttcagtga

SEQ ID NO: 146 - protein, 101 aa, Oryza sativa
MSSSWTTKQNKVFERALAIYDRDTPDRWQNVARAVGGGKSVDDVKRHYEKLIKDVDRIDSTGGHQGSHYNSSNASSSSSSSSSNSRGSANEDQRRRYHNFQ

SEQ ID NO: 147 - DNA, 258 bp, Oryza sativa
atgtctgggtcccggagctcctcccccaactcgaagtctgagtggagcaggaaggagaacaagatgttcgaggaggcgctcgcctactacggcgaggacacgcccaaccggtgggacaaggtggccagcgccatgggaggcatcaagtccgctgaggagatccgctgccactacgaagacctcaccgatgacgtcaagacgatcgagtccgggcgagtgcagttccccaagtacaagacgcagggatactggacctga

SEQ ID NO: 148 - protein, 85 aa, Oryza sativa
MSGSRSSSPNSKSEWSRKENKMFEEALAYYGEDTPNRWDKVASAMGGIKSAEEIRCHYEDLTDDVKTIESGRVQFPKYKTQGYWT

SEQ ID NO: 149 - DNA, 336 bp, Oryza sativa
atggcgtcggcggccggctcgaagcagcagcaggcgatgatgtcgttgccgtcgtcccgcggcggcggcggcggcgggtggacgcagcggcagaacaagcagttcgagtgcgcgctggcggtgtacgacaaggagacgccggaccggtggcacaacatcgcccgctacatgggcggcgccaagtccgccgacgaggtccgccgccacttcgaccacctcgtcgaggacgtctcccgcatcgagtccggccgcgtccccttcccccgctactcctcctcctcctcctcccgcggagccgacgacggaaacagatctaggtacctgaagtatcagtga

SEQ ID NO: 150 - protein, 111 aa, Oryza sativa
MASAAGSKQQQAMMSLPSSRGGGGGGWTQRQNKQFECALAVYDKETPDRWHNIARYMGGAKSADEVRRHFDHLVEDVSRIESGRVPFPRYSSSSSSRGADDGNRSRYLKYQ

SEQ ID NO: 151 - DNA, 252 bp, Oryza sativa
atgggttcgtcgtggacactcgatcagaacaaggtctttgagctggcgctggcgacatacggcaaggacacgccggaccgctgggaaaatgtggcgcgggcggtgggcggtggcaagacagcggatgatgcgaagaggcactataagaagctggaaaatgacatcggccgcattgattcaacaggtgccagcagcagcaactccaatggccgtagcagcagtgaggggcagaggtacctcaagccccagtga

SEQ ID NO: 152 - protein, 83 aa, Oryza sativa
MGSSWTLDQNKVFELALATYGKDTPDRWENVARAVGGGKTADDAKRHYKKLENDIGRIDSTGASSSNSNGRSSSEGQRYLKPQ

SEQ ID NO: 153 - DNA, 270 bp, Oryza sativa
atgtcttctgctgggtcacgtagctcgtcccgcaacagcaacatggcgtcagagtggagcaaagaggagaacaagctgttcgagcaggccattgcctactacggcgagggcgcgcctgatctctggcacaaggtgtcccgcgccatggggggcaccaagacagccgacgaggtgcgcctccacttcgagatcctcgtggacgatatcaagctgattgaggcaaggcgagtcccgttccccaagtacaatacacagggagcatggaactga

SEQ ID NO: 154 - protein, 89 aa, Oryza sativa
MSSAGSRSSSRNSNMASEWSKEENKLFEQAIAYYGEGAPDLWHKVSRAMGGTKTADEVRLHFEILVDDIKLIEARRVPFPKYNTQGAWN

SEQ ID NO: 155 - DNA, 330 bp, Oryza sativa
atgagttcatcatggacgacgaagcagaacaagctgttcgagagggcgctggcgacatacgacaaagacacgccgggccgctggcagaacgtggcgcgggcagtgggtggtggaaagacggccgaggaggtgaagaggcactacgacaagctgcttcaagacctgcaccacattgagtcggcaggccgtcagggttcccaatacggcggcagcagcagcagcaaatccaaaggtggcagcagcagcggggagcagagatatcggaacagagactggaagcagcaaccagggctccatagtggtgccgtgaaaagagcctctcagtattag

SEQ ID NO: 156 - protein, 109 aa, Oryza sativa
MSSSWTTKQNKLFERALATYDKDTPGRWQNVARAVGGGKTAEEVKRHYDKLLQDLHHIESAGRQGSQYGGSSSSKSKGGSSSGEQRYRNRDWKQQPGLHSGAVKRASQY

SEQ ID NO: 157 - DNA, 273 bp, Oryza sativa
atggcgcagcaggcaagggcgcagtggccgcagaagcagaacaagctgttcgagcaggcgctggcggtgtacgacaaggagacgcccgaccggtggcacaacatcgcccgcgccgtcggcggcggcaagtcggcggaggacgtcaagcgctactacgagatgctggaggaggacatcaagcacatcgagtccggcaaggtccccttccccgcctaccgctgccccgccgccgccggctaccaggccgaaaggttgaagcatttgaagatctag

SEQ ID NO: 158 - protein, 90 aa, Oryza sativa
MAQQARAQWPQKQNKLFEQALAVYDKETPDRWHNIARAVGGGKSAEDVKRYYEMLEEDIKHIESGKVPFPAYRCPAAAGYQAERLKHLKI

SEQ ID NO: 159 - DNA, 261 bp, Persea americana
atggcatcaagctcaatgcgtagctccaactcatcctggacacccaagcagaacaaactgtttgaggaggcgttggccaggtatgacaaggacacccctgaccgctggcagaatgttgccagggctgtgggtgggaagtccgcagaggaggtgaagaggcactacgagctcctcgtcgaggatctcaagtatattgaatccggccaggtgcctttccccaattacaagtcctctgggggaaggaactccaaaggcttttga

SEQ ID NO: 160 - protein, 86 aa, Persea americana
MASSSMRSSNSSWTPKQNKLFEEALARYDKDTPDRWQNVARAVGGKSAEEVKRHYELLVEDLKYIESGQVPFPNYKSSGGRNSKGF

SEQ ID NO: 161 - DNA, 420 bp, Persea americana
atggcatcaagctcaatgcgtagctccaactcatcctggacacccaagcagaacaaactgtttgaggaggcgttggccaggtatgacaaggacacccctgaccgctggcagaatgttgccaaggctgtgggtgggaagtccgcagaggaggtgaagaggcactacgagctcctcgtcgaggatctcaagtatattgaatccggccaggtgcctttccccaattacaagtcctctgggggaaggaactccaaaggtaacatagaaaatgaccagattattgtgactatctatttagttctcattcccctgctcttcccctcaaatctcatactgagatggaatgaccatccggagatcattctcctgctagagtcttcactgttccatctgttttctgtagttctactaataaaaacttga

SEQ ID NO: 162 - protein, 139 aa, Persea americana
MASSSMRSSNSSWTPKQNKLFEEALARYDKDTPDRWQNVAKAVGGKSAEEVKRHYELLVEDLKYIESGQVPFPNYKSSGGRNSKGNIENDQIIVTIYLVLIPLLFPSNLILRWNDHPEIILLLESSLFHLFSVVLLIKT

SEQ ID NO: 163 - DNA, 303 bp, Phaseolus coccineus
atggcctcaagctctatcaacaaacaaaagccttctgactcctcttggacaccaaaacagaacaaactgtttgaaaaagcacttgcaaaatatgataaggataccccagaccggtggcagaatgtggccacagcagtaggtgacaaatctccagatgaggttaagagacactatgaaatcctcttggaggacctcagacacatagagtctggccgtgttcctctcccgaaatacaggtccactggaagcagcaccaacgttgatgatgaagagagacttctgaagtatcttaagctgaattga

SEQ ID NO: 164 - protein, 100 aa, Phaseolus coccineus
MASSSINKQKPSDSSWTPKQNKLFEKALAKYDKDTPDRWQNVATAVGDKSPDEVKRHYEILLEDLRHIESGRVPLPKYRSTGSSTNVDDEERLLKYLKLN

SEQ ID NO: 165 - DNA, 279 bp, Populus euphratica
atgtcttccagctatcaaactccaaggaattctagcccctcttggacaccaagggaaaacaaactgtttgaaaaggctctagccttgtttgataaggacacaccggaccggtggcaaaatatagccaaagctgttggtggtgtgaaatcagctgaggaagtgaagagacactacgaaatcctcattgaagatctcaaatacatcgagtccggccgtgttcctattcctaattacaagtccagtagaagctgcagcagtacaaacgaagaagaaaggtaa

SEQ ID NO: 166 - protein, 92 aa, Populus euphratica
MSSSYQTPRNSSPSWTPRENKLFEKALALFDKDTPDRWQNIAKAVGGVKSAEEVKRHYEILIEDLKYIESGRVPIPNYKSSRSCSSTNEEER

SEQ ID NO: 167 - DNA, 291 bp, Populus euphratica
atggcttcaggttctagtaattggacttcaaagcaaaacaaactgttcgaaaatgccttggccatctatgatcaagaatctcctgatcgctggcacaatcttgccagggctgttggaaaaacagtggaggaagtgaagaagcattatcagatgcttgttgaagacgtccagcagattgaagctggtgaaatccctttgcccaactacactagaagatctggagctagcaacaaaagctaccattgcattgatgatcaagcaaaaagggtgaagaatcttaatctcaactga

SEQ ID NO: 168 - protein, 96 aa, Populus euphratica
MASGSSNWTSKQNKLFENALAIYDQESPDRWHNLARAVGKTVEEVKKHYQMLVEDVQQIEAGEIPLPNYTRRSGASNKSYHCIDDQAKRVKNLNLN

SEQ ID NO: 169 - DNA, 264 bp, Populus euphratica
atggcatcaagctcaatgtcctctcgcggttcgggctcgtggactgctcagcagaacaaagcctttgaaagggctttggccgtgtatgacagagacacgcccgatcgctggtacaatgtagccagggcggtcggtggaaaaaccgcagaagaagtgaaaaggcactatgaactgcttgtggaggatgtgaagcatattgagtcgggtcatgttcctttccctaattacaggactactggagcaaatggccacgcaagaggatga

SEQ ID NO: 170 - protein, 87 aa, Populus euphratica
MASSSMSSRGSGSWTAQQNKAFERALAVYDRDTPDRWYNVARAVGGKTAEEVKRHYELLVEDVKHIESGHVPFPNYRTTGANGHARG

SEQ ID NO: 171 - DNA, 324 bp, Picea glauca
atggcttgtcaatcagcttcttcatcgggcaagcattcttctaatagtactgcaacaaattggactttcaagcaaaacaaactgtttgaaaacgccttagccatttatgacaaagacactcctgaccgttggcataatgtggcttctgtggttggcgggaaatccccagaggaagtcaagaggcattatgagattctgttggaggacttgaattccattgaagcaggccaggtgcctttccccaaatacatatcttcgaggcctaacaacagggagatcttgggaggaggaaagcctatcctcggtaattctgacaatgcatag

SEQ ID NO: 172 - protein, 107 aa, Picea glauca
MACQSASSSGKHSSNSTATNWTFKQNKLFENALAIYDKDTPDRWHNVASVVGGKSPEEVKRHYEILLEDLNSIEAGQVPFPKYISSRPNNREILGGGKPILGNSDNA

SEQ ID NO: 173 - DNA, 255 bp, Pinus pinaster
atggctggtcaatcagcttcttcatcagcaagttcctcttcctggacttccaagcaaaataaacaatttgagaaggccttagctctctatgacaaggacactcctgaccgttggctcaatgttgcttcgatggttgatgggaaatcaccagaggaagtcaaaaaacattatgagattctggtagaggatttcaagtgcattgaagcaggccaggtgccttgtcccaactacaaatcttcgacaagttcgcggtag

SEQ ID NO: 174 - protein, 84 aa, Pinus pinaster
MAGQSASSSASSSSWTSKQNKQFEKALALYDKDTPDRWLNVASMVDGKSPEEVKKHYEILVEDFKCIEAGQVPCPNYKSSTSSR

SEQ ID NO: 175 - DNA, 369 bp, Pinus taeda
atgttggaaaggtgcagcagagctttggtggaatggagtgccgaggagaacaagattttcgagaatgcattggccatctacggcaaggacacgcctgatcgatggcacaatgtgtcttccatggttggagggaagagcccagaggaagtgaagagacattatgagattctgttagaggatttaagctgcattgaggctggaaaagtgtcaattcccaactatttatttgatattgcaacagatgatgaagtccctgttcatcacaaaaatgcgggaggagaagggcaggtcactgtacctggaagcagcaataatattgtttggactgatgaggaacaaagggttttaaggcgcttgaagatacagtga

SEQ ID NO: 176 - protein, 122 aa, Pinus taeda
MLERCSRALVEWSAEENKIFENALAIYGKDTPDRWHNVSSMVGGKSPEEVKRHYEILLEDLSCIEAGKVSIPNYLFDIATDDEVPVHHKNAGGEGQVTVPGSSNNIVWTDEEQRVLRRLKIQ

SEQ ID NO: 177 - DNA, 240 bp, Populus tremula
atgtctaatttcacgtctacagatggctccggctcctcctgaacagccaaacaaaacaagctattccacaaggccctggctgtatactacaaagacaccccggaccgctggcaaaatgtggccaaggccgccggtggcaagtctcctgaaaaatttaagacgcactatgatcgtctcgtggaagatctcgtgtacatagaatccggcctagcgcctctgccgaatgacaagccctctggc

SEQ ID NO: 178 - protein, 79 aa, Populus tremula
MSNFTSTDGSGSSTAKQNKLFHKALAVYYKDTPDRWQNVAKAAGGKSPEKFKTHYDRLVEDLVYIESGLAPLPNDKPSG

SEQ ID NO: 179 - DNA, 300 bp, Populus tremula
atgtcttatttcacgtcttcaaatggctccggctcctcctggacagccaaacaaaacaagctattcgagaaggccctggctgtatacgacaaagacaccccggaccgctggcaaaatgtggccaaggccgtgggtggcaagtctcctgaagaagttaagaggcactatgatcgtctcgtggaagatctcgtgtacataaaatccggccgaacgcctctgccgaattacaagccctctggcagcaatggtaaaggacttggtgaagagcaaaggcttacgaggaacttgaagctgcaatga

SEQ ID NO: 180 - protein, 99 aa, Populus tremula
MSYFTSSNGSGSSWTAKQNKLFEKALAVYDKDTPDRWQNVAKAVGGKSPEEVKRHYDRLVEDLVYIKSGRTPLPNYKPSGSNGKGLGEEQRLTRNLKLQ

SEQ ID NO: 181 - DNA, 291 bp, Populus trichocarpa
atggcttcaggttctagtaattggacttcaaagcaaaacaaactgttcgaaaatgccttggccatctatgatcaagaatctcctgatcgctggcacaatcttgccagggctgttggaaaaacagtggaggaagtgaagaagcattatcagatgcttgttgaagacgtccagcagattgaagctggtgaaatccctttgcccaactacactagaagatctggagctagcaacaagagctaccattgcaatgatgatcaagcacaaagggtgaagaatcttaatctcaactga

SEQ ID NO: 182 - protein, 96 aa, Populus trichocarpa
MASGSSNWTSKQNKLFENALAIYDQESPDRWHNLARAVGKTVEEVKKHYQMLVEDVQQIEAGEIPLPNYTRRSGASNKSYHCNDDQAQRVKNLNLN

SEQ ID NO: 183 - DNA, 264 bp, Populus trichocarpa
atggcatcaagctcaatgtcctctcgcggttcgggctcgtggactgttcagcagaacaaagcctttgaaagggctttggctgtgtatgacagagacacgcccgatcgctggtacaatgtagccagggcagtcggtggaaaaaccgcagaagaagtgaaaaggcactatgaactgcttgtggaggatgtgaagcatattgagtcgggccatgttcccttccctaattacaggactaccggggcaaatggccacgcaagaggatga

SEQ ID NO: 184 - protein, 87 aa, Populus trichocarpa
MASSSMSSRGSGSWTVQQNKAFERALAVYDRDTPDRWYNVARAVGGKTAEEVKRHYELLVEDVKHIESGHVPFPNYRTTGANGHARG

SEQ ID NO: 185 - DNA, 258 bp, Populus trichocarpa
atggcatccaattctctcaactcttcacgtaactgtagttcctcttggacccccaagcaaaacaaactattcgaaaaggccctggctttgtatgacaaggacacccctgaccgctggcataatgttgccaaagctgtgggtgggaaatctgcagaggaagtggagaggcactatgaaattctcatcaaggatgtcagggaaattgagtctggtcgggttccattccctaattacaggtcaagtggaaacagcaactaa

SEQ ID NO: 186 - protein, 85 aa, Populus trichocarpa
MASNSLNSSRNCSSSWTPKQNKLFEKALALYDKDTPDRWHNVAKAVGGKSAEEVERHYEILIKDVREIESGRVPFPNYRSSGNSN

SEQ ID NO: 187 - DNA, 297 bp, Populus trichocarpa
atggcatcaagctccgtgtcctctcgcggttcgggctcgtggactgctcagcagaacaaagcctttgaaagggctttggctgtttatgacagggacacacccgaccgttggcataatgtagccagggcagttggtggaaaaactgctgaagaagtgaaaaggcattacgaaatcctcgtggaggatgtcaagcatattgagtcaggccgagttcccttccctaattacaggactaccggggcaaatggccactcaaagactggtgaggaaaagatgtatatatatagcagtttataa

SEQ ID NO: 188 - protein, 98 aa, Populus trichocarpa
MASSSVSSRGSGSWTAQQNKAFERALAVYDRDTPDRWHNVARAVGGKTAEEVKRHYEILVEDVKHIESGRVPFPNYRTTGANGHSKTGEEKMYIYSSL

SEQ ID NO: 189 - DNA, 279 bp, Populus trichocarpa
atgtcttcaagctatcaagcttccagaaattctagatccgcttggacaccaagggaaaacaaactgtttgaaaaggcactagccttgtttgataaggacacaccggacaggtggcaaaatatagccaaagctgttggtggtgtgaaatctgccgaggaagtgaagaaacactatgaaatccttattgaagatcttcaacatatcgagtctggccgcattcctattcctaagtacaagtctagtggaagctgcaacaacacaaacgaagaggaaaggtaa

SEQ ID NO: 190 - protein, 92 aa, Populus trichocarpa
MSSSYQASRNSRSAWTPRENKLFEKALALFDKDTPDRWQNIAKAVGGVKSAEEVKKHYEILIEDLQHIESGRIPIPKYKSSGSCNNTNEEER

SEQ ID NO: 191 - DNA, 255 bp, Populus trichocarpa
atggcttatttcacgtcttcacatggttctagctcctcttggacgcccaaacaaaacaagctgtttgagaaggcactggctgtctatgacaaagacaccccagaccgctggcaaaatgtggccaaggctgtgggtggcaagtcggcagaagaagttaagatgcactacgatcgtcttgtggaggatcttacatatatagaatccggccaagctccactgccaaactacaagccctctgggagcaatagtacgtag

SEQ ID NO: 192 - protein, 84 aa, Populus trichocarpa
MAYFTSSHGSSSSWTPKQNKLFEKALAVYDKDTPDRWQNVAKAVGGKSAEEVKMHYDRLVEDLTYIESGQAPLPNYKPSGSNST

SEQ ID NO: 193 - DNA, 300 bp, Populus trichocarpa
atgtcttatttcacatcttcaaatggcaccggctcctcttggacagccaaacaaaataagctattcgagaaggccctggctgtatacgacaaagacaccccagaccgctggcaaaatgtggccaaggccgtgggtggcaagtctcctgaagaagttaagaggcactatgatcgtctcgtggaggatctcgtgtacatagaatccggccaagcccctctgccgaattacaagccctctggcagcaatggtagaggacttgttgaagagcaaaggcttacgaggaacttaaagctgcaatga

SEQ ID NO: 194 - protein, 99 aa, Populus trichocarpa
MSYFTSSNGTGSSWTAKQNKLFEKALAVYDKDTPDRWQNVAKAVGGKSPEEVKRHYDRLVEDLVYIESGQAPLPNYKPSGSNGRGLVEEQRLTRNLKLQ

SEQ ID NO: 195 - DNA, 276 bp, Sorghum bicolor
atgtcttggagcgacagtgagaacgcggtgttcgagcgcgcgctggccacgtacgaccgggacacgcccaggcggtgggagctcgtggccgccgcggtgggcggcgggaagaccgccgaggacgcgaggcgccactacgcccacctcgtcaatgacgtcggcgacatcgagtccggcggctacggcaacgaccccaaccccaaccccaacgccgccgcccgcaacggcaacaacgggaacaacaacaggggcagagccaacaggccccagagatga

SEQ ID NO: 196 - protein, 91 aa, Sorghum bicolor
MSWSDSENAVFERALATYDRDTPRRWELVAAAVGGGKTAEDARRHYAHLVNDVGDIESGGYGNDPNPNPNAAARNGNNGNNNRGRANRPQR

SEQ ID NO: 197 - DNA, 300 bp, Sorghum bicolor
atgtcgtccaactcgtcggcgtcgtcgtctgagtggacgaagccgcagcacaagctgttcgagcgcgccctggcggtgtacgacgcggacaccccggaccggtggcacaacgtggcgcgctacatgggcggcggcacgtccgtcgaggaggtgcgccgccactaccagcagctcgtcgtcgacgtcgcgcggatcgagtccgacggagtgcccttccactggttgaaatatctgaatgaagcttcaatgaagggaagggttaaacagtggctagctgtgctctttgaagaagatctataa

SEQ ID NO: 198 - protein, 99 aa, Sorghum bicolor
MSSNSSASSSEWTKPQHKLFERALAVYDADTPDRWHNVARYMGGGTSVEEVRRHYQQLVVDVARIESDGVPFHWLKYLNEASMKGRVKQWLAVLFEEDL

SEQ ID NO: 199 - DNA, 297 bp, Sorghum bicolor
atggcaacgatgtcgctgagctcgacgagggcgcagtggacggcgaagcagaacaagctgttcgagcaggcgctggcggtgtacgacagggacacgccggaccggtggcacaacatcgcgcgcgccgtcgggggcggcaagtcggcggacgaggtcaggcgctactacgagctgctggtgaaggacgtggagcacatcgaggccggcaaggtgcccttcccggcctacaggtgccccgccggctacgacgccgacagaatcgatcgatctcctgcgctgaagcacctgaagatctag

SEQ ID NO: 200 - protein, 98 aa, Sorghum bicolor
MATMSLSSTRAQWTAKQNKLFEQALAVYDRDTPDRWHNIARAVGGGKSADEVRRYYELLVKDVEHIEAGKVPFPAYRCPAGYDADRIDRSPALKHLKI

SEQ ID NO: 201 - DNA, 264 bp, Sorghum bicolor
atgtctgggtccaggaactcttcccgcaacgttaacattgattccaactggagcaaaaaggagaacaagctgttcgaggaggccctagcctgctatggtgagggcacacctgaccgctggcacaaggtggcccgtgccatgggtggcatcaagacagccgatgaagttcgccgccattatgagatccttaatgatgatgtcacgctcattgaatccggcggagttccattccccaactacaacacacagggagcttggaactaa

SEQ ID NO: 202 - protein, 87 aa, Sorghum bicolor
MSGSRNSSRNVNIDSNWSKKENKLFEEALACYGEGTPDRWHKVARAMGGIKTADEVRRHYEILNDDVTLIESGGVPFPNYNTQGAWN

SEQ ID NO: 203 - DNA, 294 bp, Sorghum bicolor
atgagttcatcctggaccgatagtcaaaacaagcttttcgagagggcgctggcagtatatgacaaggacacaccagaccgctggcacaatattgcacgagcagttggctgtggaaagacagctgaggatgtgaagaggcactacagatggctgaagagggatgtgcagcaaattgaatctggagaaggcggtcaaggatcccactccagcaactccagtggtagtggaagcagcagcaattcttgtggcaggaacaatgatgacaagaggatgaggcaccccaaaccgcagtga

SEQ ID NO: 204 - protein, 97 aa, Sorghum bicolor
MSSSWTDSQNKLFERALAVYDKDTPDRWHNIARAVGCGKTAEDVKRHYRWLKRDVQQIESGEGGQGSHSSNSSGSGSSSNSCGRNNDDKRMRHPKPQ

SEQ ID NO: 205 - DNA, 330 bp, Sorghum bicolor
atgtctgcctcgcggagctcctctcccaactccatgtcaaagtggagccccaaagagaacaagatgtttgaacaggcactcgcctactatggcgagggcacacccaaccggtgggacaaggtgtccagcgccatgggaggcatcaagtctgctgaggaggtgcgctgccactatgaagatcttgactatgacgtcaagatgattgagtcaggccatgtaccgtacccccagtacaagacacagggattctggacccgaggctcactaatgcccactaattatgtgggctccaatcctagtattatgacaaaaatctcctacttccaatag

SEQ ID NO: 206 - protein, 109 aa, Sorghum bicolor
MSASRSSSPNSMSKWSPKENKMFEQALAYYGEGTPNRWDKVSSAMGGIKSAEEVRCHYEDLDYDVKMIESGHVPYPQYKTQGFWTRGSLMPTNYVGSNPSIMTKISYFQ

SEQ ID NO: 207 - DNA, 267 bp, Sorghum bicolor
atggcgtcgatgcagtcgatgacgagcgcagcggcgcgcgcgcagtggacgccgaagcagaacaagctgttcgagcaggcgctggccgtttacgacaaggacacgccggaccggtggcacaacatcgcccgcgccgtcggcggcggcaagtccgccgaggacgtcaggcgctactacgacctgctggaggaggacgtcggccacatcgagtccggcaaggtgcccttcccggcctaccgctgcgccaccggctacggggccgcctga

SEQ ID NO: 208 - protein, 88 aa, Sorghum bicolor
MASMQSMTSAAARAQWTPKQNKLFEQALAVYDKDTPDRWHNIARAVGGGKSAEDVRRYYDLLEEDVGHIESGKVPFPAYRCATGYGAA

SEQ ID NO: 209 - DNA, 306 bp, Saruma henryi
atggcatccagttcgatgcgcagcaccgggtctgcctggaccgccacgcagaacaaactgttcgagaaggccttggcggtgtacgacaaggacacccccgaccgttggcacaatgtcgcgagggcggtcggtgggaagtcggcggacgaagtgaagaggcactacgatatcctcatcgaggacctcaagtatatcgagtcgggaaaaatgcccttccccaactacaggtccactggaggcaacaacaaaggcagcagcctcacagatgaagagcagaggcttatcaagtacctgaagctccaatga

SEQ ID NO: 210 - protein, 101 aa, Saruma henryi
MASSSMRSTGSAWTATQNKLFEKALAVYDKDTPDRWHNVARAVGGKSADEVKRHYDILIEDLKYIESGKMPFPNYRSTGGNNKGSSLTDEEQRLIKYLKLQ

SEQ ID NO: 211 - DNA, 306 bp, Sesamum indicum
atggcgtcgagctccatgacatccgcacgtggctcagcctcagcgtggacgtctaagcaaaacaagcagttcgaggaggctttggcaatgtacgacaaggacacgcctgaccgttggcataatatagcccgagccgtgggtgggaagtcagcagaggaagtgagaaggcattatgagattctggttaaggacattatgcagatcgagacggatcaggtgccaatacctaactacagagccatggggagcaacagcagaggatacggcaatgagcacaggcttctgaagaatctgaaactgcagtga

SEQ ID NO: 212 - protein, 101 aa, Sesamum indicum
MASSSMTSARGSASAWTSKQNKQFEEALAMYDKDTPDRWHNIARAVGGKSAEEVRRHYEILVKDIMQIETDQVPIPNYRAMGSNSRGYGNEHRLLKNLKLQ

SEQ ID NO: 213 - DNA, 264 bp, Saccharum officinarum
atgtctgcctcgcggagctcctctcccaactccatgtcaaagtggagcccgaaagagaacaagatgtttgaacaggcactcgcctactatggcgagggcacacccaaccggtgggacaaggtgtccagcgccatgggaggcatcaagtctgctgaggaggtgcgctgccactatgaagatcttgactacgacgtcaagatgattgagtcaggccacgtgccgtacccccagtacaagacacagggattctggacccgaggttaa

SEQ ID NO: 214 - protein, 87 aa, Saccharum officinarum
MSASRSSSPNSMSKWSPKENKMFEQALAYYGEGTPNRWDKVSSAMGGIKSAEEVRCHYEDLDYDVKMIESGHVPYPQYKTQGFWTRG

SEQ ID NO: 215 - DNA, 264 bp, Saccharum officinarum
atgtcgtccaactcgtcgccgccgtcgtctgagtggacgaagccgcagcaaaagctgttcgagcgcgccctgtcggtgtacgacacggacaccccggaccggtggcacaacgtggcgcgctacatgggcggcggcacgtctgtggaggaggtgcgccgcgcctaccagcggctcgtcgtggacgtcacgcggatcgagtccggcggagtgcccttccactggtacgccgccgccccgccgccatcgacgctgcatcgaggttga

SEQ ID NO: 216 - protein, 87 aa, Saccharum officinarum
MSSNSSPPSSEWTKPQQKLFERALSVYDTDTPDRWHNVARYMGGGTSVEEVRRAYQRLVVDVTRIESGGVPFHWYAAAPPPSTLHRG

SEQ ID NO: 217 - DNA, 294 bp, Saccharum officinarum
atgagttcgtcctggactgacagtcaaaacaagcttttcgagagtgcgctggccatatatgacaaggacacaccagaccgctggcacaaggttgcacaagcagttggttgtggaaagaccgctgaggatgtgaagaggcactataaatggctgaagaaggatgtgcagcaaattgaatctggagaaggcagtcaaggatcccactccagcagctccggtggtagtggaagcagcagcaattcttgtggcaggaacaatggtgacaagaggatgaggcaccccaaaccgcagtga

SEQ ID NO: 218 - protein, 97 aa, Saccharum officinarum
MSSSWTDSQNKLFESALAIYDKDTPDRWHKVAQAVGCGKTAEDVKRHYKWLKKDVQQIESGEGSQGSHSSSSGGSGSSSNSCGRNNGDKRMRHPKPQ

SEQ ID NO: 219 - DNA, 261 bp, Saccharum officinarum
atgagttcgtcatcatggacggataggcagaacaagctgtttgagaaggcactagccaagtatgataaagacaagccggactactggcaaaacgtggctcgggcagtgggcaacggaaagacggtcgatgacgtgaagaggcagttcaaggagctggttcgagatgtggaccacattgaatccacaggcggtcagaattcacagtatggcggtggcagcagcagcggaagcggcattgagcagaggcgcaacctccagtga

SEQ ID NO: 220 - protein, 86 aa, Saccharum officinarum
MSSSSWTDRQNKLFEKALAKYDKDKPDYWQNVARAVGNGKTVDDVKRQFKELVRDVDHIESTGGQNSQYGGGSSSGSGIEQRRNLQ

SEQ ID NO: 221 - DNA, 267 bp, Solanum tuberosum
atggcatcaagctcacttcaatcttcatcatggacaccgcagcaaaacaagttatttgaaagggcactagctcaattcgataaggacacacctgaccggtggcagaatgtggcgcgggcggttggaggtggaaaatccgccgatgaagtaaagagacactatgaaatacttattgaggatctcaagcgcattgaatctggacgtgttcctcttcctacttacacccatgaacaacaaaggcttttgaggtatatgaacctgcactag

SEQ ID NO: 222 - protein, 88 aa, Solanum tuberosum
MASSSLQSSSWTPQQNKLFERALAQFDKDTPDRWQNVARAVGGGKSADEVKRHYEILIEDLKRIESGRVPLPTYTHEQQRLLRYMNLH

SEQ ID NO: 223 - DNA, 228 bp, Solanum tuberosum
atgacatcaaattcactcactgcttggactccaatagaaaacaagaaattcgagcaggcactcgcggtctacgacaaggacacatctgatcgctggcaaaacattgctagatacgttggtgggaaatcagttgaagaagttaaacatcactatgctatccttgtagaggatcttaagcacattgaatctggtgacgttccattcccaaaatacaagtcaggtcgttag

SEQ ID NO: 224 - protein, 75 aa, Solanum tuberosum
MTSNSLTAWTPIENKKFEQALAVYDKDTSDRWQNIARYVGGKSVEEVKHHYAILVEDLKHIESGDVPFPKYKSGR

SEQ ID NO: 225 - DNA, 282 bp, Solanum tuberosum
atgcgcacaaattcaacgtggagtcatcatcaaaacaagttatttgagaatgcattggccatttacgacatcgatacaccagatcgatggcgtaaattggccaaggcagttggtggaaaaacagaagaagaagtgaaaaatcactatgaaaaacttgttgaagatattaagcgtatcgagtctggaaatgttccattacctaattataatagtggtcgtaataataaaggctacaatttcatggatgaagaacaaaggctgaagtatttgaagctccaatga

SEQ ID NO: 226 - protein, 93 aa, Solanum tuberosum
MRTNSTWSHHQNKLFENALAIYDIDTPDRWRKLAKAVGGKTEEEVKNHYEKLVEDIKRIESGNVPLPNYNSGRNNKGYNFMDEEQRLKYLKLQ

SEQ ID NO: 227 - DNA, 243 bp, Triticum aestivum
atgtcagggagctcatcccgcggcggcgacgacgcggcgtggagcgccaaggagaacaagctgttcgaggaggcactcgcctaccacggcgagggcacgcccgaccgctggctcaaggtgtctcgcgccatgggcgggaccaagacggccgacgaggtgcgccgccactacgagatcctcgtggacgacatcaacctcatcgagtctggcagggtcccgttccccaagtacaaggacaactga

SEQ ID NO: 228 - protein, 80 aa, Triticum aestivum
MSGSSSRGGDDAAWSAKENKLFEEALAYHGEGTPDRWLKVSRAMGGTKTADEVRRHYEILVDDINLIESGRVPFPKYKDN

SEQ ID NO: 229 - DNA, 267 bp, Triticum aestivum
atgtcttccgggtcgtcgtgtcggagcacctcgccgagctcggactcggagtggagcaagaaggagaacaagatgttcgaggaagcgctggcctactacggcgtgagcgcccccaacctctgggagaaggtggccagtgccatggggggcaccaagtccgctgaggaggtgcgccgccacttccagatccttgtcgatgacgtcaacagcatcgagcatggccgcatcccattccccaagtacaagacccagggcttctggacctaa

SEQ ID NO: 230 - protein, 88 aa, Triticum aestivum
MSSGSSCRSTSPSSDSEWSKKENKMFEEALAYYGVSAPNLWEKVASAMGGTKSAEEVRRHFQILVDDVNSIEHGRIPFPKYKTQGFWT

SEQ ID NO: 231 - DNA, 243 bp, Triticum aestivum
atgtcctcaccgagctcagactcggagtggagcaagaaggagaacaagatgtttgaggaggcgcttgcctactacggcatgggcgcccccaacctctgggagaaggtagccagcgccatggggggcaccaagtccgccgaggaggtgcgccgccacttccagttccttgttgacgacgtcaagaacatcgagcacggacgcatccccttccccaagtacaagacccggggcttctggacctaa

SEQ ID NO: 232 - protein, 80 aa, Triticum aestivum
MSSPSSDSEWSKKENKMFEEALAYYGMGAPNLWEKVASAMGGTKSAEEVRRHFQFLVDDVKNIEHGRIPFPKYKTRGFWT

SEQ ID NO: 233 - DNA, 270 bp, Triticum aestivum
atgtcttctgggtcaaggagcgcatcccgcggcggcgccaacccggagtggagcaagaaggagaataagctgttcgaggaggcactcgcctactacggcgagggcacgcccgaccgctggctcaaggtgtcccgcgccatgggcgggaccaagaatgccgacgaggtgcgccgccactatgagatccttgatagcgacatcaagctgatcgactccggcaggctccctttccccaagtacaacacccagggccagggggcttggaactga

SEQ ID NO: 234 - protein, 89 aa, Triticum aestivum
MSSGSRSASRGGANPEWSKKENKLFEEALAYYGEGTPDRWLKVSRAMGGTKNADEVRRHYEILDSDIKLIDSGRLPFPKYNTQGQGAWN

SEQ ID NO: 235 - DNA, 267 bp, Triticum aestivum
atgtcttctgggtcgtcgtctcggagcaactcgccgagctcggactcggagtggagcaagaaggagaacaagatgttcgaggaggcgctggcctactacggtgtgggcgcccccaacctctgcgagaaggtggccagcgccatggggggcaccaagtccactgaggaggtgcgccgccacttccagttcctcgtcgacgacgtcaacaacatcgagcacggtcgcatccccttccctaagtacaagacccaaggattctggacctag

SEQ ID NO: 236 - protein, 88 aa, Triticum aestivum
MSSGSSSRSNSPSSDSEWSKKENKMFEEALAYYGVGAPNLCEKVASAMGGTKSTEEVRRHFQFLVDDVNNIEHGRIPFPKYKTQGFWT

SEQ ID NO: 237 - DNA, 300 bp, Triticum aestivum
atggcgtcgctgtcaatgagcgcggccgggagagctgggtggacgccgcagcagaacaagctgttcgagcaggcactggcagtgcacgaccgggacacgcccgaccgctggcacaacgtcgctcgtgccgttggtggcggcaagtcggccgacgatgtcaaacgctactacgagctgctcgtccacgacatcgcccgcatcgaggctggcaaggtggccttccccgcctaccgttccccctgcccaggccccggccacaacggctacgaggccgacaggttgaagcacttgaagatctag

SEQ ID NO: 238 - protein, 99 aa, Triticum aestivum
MASLSMSAAGRAGWTPQQNKLFEQALAVHDRDTPDRWHNVARAVGGGKSADDVKRYYELLVHDIARIEAGKVAFPAYRSPCPGPGHNGYEADRLKHLKI

SEQ ID NO: 239 - DNA, 276 bp, Tagetes erecta
atggcaacaagctcaatgacatcatcacgtaattactcgggatcctcatggacaccgaggcaaaacaagcaattcgaagacgctttagctcactacaacaaagatagtcctgacaggtggcaaaacattgcacgggctgtaggtggaaaatcggcagaggaggtgaagaggcattatgatatccttgagagggatatcatgcaaattgaatcagatcaagtgcctttacctaattatagggataacggtcgtcgattgcaaatgaacagaggctag

SEQ ID NO: 240 - protein, 91 aa, Tagetes erecta
MATSSMTSSRNYSGSSWTPRQNKQFEDALAHYNKDSPDRWQNIARAVGGKSAEEVKRHYDILERDIMQIESDQVPLPNYRDNGRRLQMNRG

SEQ ID NO: 241 - DNA, 219 bp, Trifolium pratense
atgggatcagcttggactccaaggcaaaacaaacaatttgagagagctttggctatatatgatagagaaactccagataggtggcagaatgttgctaacatggtgggaaaatcagttgaagatgttaaaagacattatgagatactcaaagaagatgttaggcgcatcgaacatggtcaagttgcatacccttacagagcaaacaatgctaataattga

SEQ ID NO: 242 - protein, 72 aa, Trifolium pratense
MGSAWTPRQNKQFERALAIYDRETPDRWQNVANMVGKSVEDVKRHYEILKEDVRRIEHGQVAYPYRANNANN

SEQ ID NO: 243 - DNA, 303 bp, Thellungiella salsuginea
atggcatcaaacacaatgtcttcttatggctctggctcatggactgttaagcagaacaaagcctttgagcgtgctctagcaacctatgaccaagacacccctgaccgttggtacaatgttgctagagctgttggtggcaaaacaccggaagaagctaagagacaatatgaccttctcgtgcgtgacatcgagagcattgagaatggacacgtaccattccctgactacaaaagtaatggaggcagcaccaaaggcaggctgcgtgatgaggaaaagaggatgagaagcatgaggttgcagtga

SEQ ID NO: 244 - protein, 100 aa, Thellungiella salsuginea
MASNTMSSYGSGSWTVKQNKAFERALATYDQDTPDRWYNVARAVGGKTPEEAKRQYDLLVRDIESIENGHVPFPDYKSNGGSTKGRLRDEEKRMRSMRLQ

SEQ ID NO: 245 - DNA, 228 bp, Vitis vinifera
atggcatcaacctctctcaagagctttgggtcatgggccccaaagcaaaacaaactgtttgaaaaggctctagccttatatgacagggacccccccggccgctggcagaatgtgcccaacgctgtgggtggcaaatctgctgaggaggtgaaacaaccctatgagatccttattcgggacctcaagcatatcgagtcgggccgtgttcctattcccaacttcaagtag

SEQ ID NO: 246 - protein, 75 aa, Vitis vinifera
MASTSLKSFGSWAPKQNKLFEKALALYDRDPPGRWQNVPNAVGGKSAEEVKQPYEILIRDLKHIESGRVPIPNFK

SEQ ID NO: 247 - DNA, 228 bp, Vitis vinifera
atggtagcaccctctctaaagatctctggatcatggacccctaagcaaaacaaactgtttgaaaaggctctagccttatatgacagggacacccccgaccgctggcagaatgtggccaacgctgtgggtggcaaatctgctgaggaggtgaaacaacactatgagatccttattcgggacctcaagcatatcgagtcgggccgtgttcctattcccaactacaagtag

SEQ ID NO: 248 - protein, 75 aa, Vitis vinifera
MVAPSLKISGSWTPKQNKLFEKALALYDRDTPDRWQNVANAVGGKSAEEVKQHYEILIRDLKHIESGRVPIPNYK

SEQ ID NO: 249 - DNA, 276 bp, Vitis vinifera
atgggattgagttcaaataactggactaccaagcaaaacaaactgttcgagaatgctttggtgatgtatgacaaggacaccccggaccgctggcagaacatggccagggctgtgggtgggaagactgtggaggaggtgaagaggcactatgagatgcttgtggaggatgtcaagcatattgagtttggccaagtcccattgcctaactacagaaaagctggagcctccaacaaaggatacaacttcaacgatgaagaacagagggcttccttttga

SEQ ID NO: 250 - protein, 91 aa, Vitis vinifera
MGLSSNNWTTKQNKLFENALVMYDKDTPDRWQNMARAVGGKTVEEVKRHYEMLVEDVKHIEFGQVPLPNYRKAGASNKGYNFNDEEQRASF

SEQ ID NO: 251 - DNA, 306 bp, Vitis vinifera
atggcatccagctcaatgtcctcccgcagctctggctcatcctggactgccaagcaaaacaaagcctttgaagaggcgcttgcagtgtatgacaaggacacccctgaccggtggtacaatgttgccagggctgttggtgggaaaaccgtggaggaagtgaagaggcactatgagatccttgttgaggatatcaagagcatcgactcagacaaagtgcccttccccaattacaagactaccggagctagtggccggtccaacatgagcgaccaggaaaagaggatgatgaatctgaagctccgctga

SEQ ID NO: 252 - protein, 101 aa, Vitis vinifera
MASSSMSSRSSGSSWTAKQNKAFEEALAVYDKDTPDRWYNVARAVGGKTVEEVKRHYEILVEDIKSIDSDKVPFPNYKTTGASGRSNMSDQEKRMMNLKLR

SEQ ID NO: 253 - DNA, 309 bp, Vitis vinifera
atggcatcccatgctttctcctcttcatgttattcaagctcctcttggacacagaagcaaaacaaactatttgaagaagccctggctctgtacgacaagaacactcctgaccgctgggcaaatatagccaaggctgtgggtgggaaatctgctgaggaagtaaagagacactatgagatcctggaacaggatgtcatgcatatagaaaacggccaagtccctctacccatttacaggtcaactgggagtagcagcggaggaagtgttgatgaacaaaggcacttgctgaagaatctaaagctccgttga

SEQ ID NO: 254 - protein, 102 aa, Vitis vinifera
MASHAFSSSCYSSSSWTQKQNKLFEEALALYDKNTPDRWANIAKAVGGKSAEEVKRHYEILEQDVMHIENGQVPLPIYRSTGSSSGGSVDEQRHLLKNLKLR

SEQ ID NO: 255 - DNA, 297 bp, Vitis vinifera
atggatgattttccaaatgttttgtgtgaatggagttgggaggagaacaagtcgtttgagctagctctggcagtggtggatgaacgagacccagatcggtggaaggtcgtggcagccatggtgggagggaagagtgcggaggaggttgagaaacattatgttattctcttgcaggatttgcagttcatcgagtctggtgaaatggatcataaactgggtgaggctcagccctgcgttcaactcgagtgttggaccgaccaagatcacaagttgctggttcaattggacataaagtga

SEQ ID NO: 256 - protein, 98 aa, Vitis vinifera
MDDFPNVLCEWSWEENKSFELALAVVDERDPDRWKVVAAMVGGKSAEEVEKHYVILLQDLQFIESGEMDHKLGEAQPCVQLECWTDQDHKLLVQLDIK

SEQ ID NO: 257 - DNA, 291 bp, Vitis vinifera
atggcatcagggtctcgcatgggctctggcttatggacttcaaagcaaaacaaactgtttgaaaaggctctagccttgtatgacaaggacaccccagaccgttggcagaatgtagccaaggctgtgggtgggaagtctgccgaggaagtgaagagacactatgagatcctcattgaggacctcaaacatatcgaatcgggccatgttccgattcctaattacaagtccactggaagcaacagcattggtgatcaagaacagaggctgctgaagtgtataaagctgcaataa

SEQ ID NO: 258 - protein, 96 aa, Vitis vinifera
MASGSRMGSGLWTSKQNKLFEKALALYDKDTPDRWQNVAKAVGGKSAEEVKRHYEILIEDLKHIESGHVPIPNYKSTGSNSIGDQEQRLLKCIKLQ

SEQ ID NO: 259 - DNA, 264 bp, Zea mays
atggcgtctatgtcgctgagctcgtcgagggcgcagtggacggctaagcagaacaagctgttcgagcaggcgctggcggtgtacgacagggacacgccggaccgctggcacaacatcgcgcgcgccgtcgggctggcaagtccgcggacgacgtcaggcgctactacgagctgctggaggaggacgtcggccacatcgagtccggcaaggtgcccttccccgcctaccgctaccccgccggctacggggccgccgacaggctga

SEQ ID NO: 260 - protein, 87 aa, Zea mays
MASMSLSSSRAQWTAKQNKLFEQALAVYDRDTPDRWHNIARAVGLASPRTTSGATTSCWRRTSATSSPARCPSPPTATPPATGPPTG

SEQ ID NO: 261 - DNA, 273 bp, Zea mays
atgtcgtcttggacctactgtgagaacgcgctgttcgagcgcgcgctggccacctacgaccgggacacgcccaggcggtgggagctcgtggccgccgcggtgggcggcgggaagaccgccgaggacgccaggcggcactacgcccacctcgtgctcgacgtcggcgacatcgagtccggcggctacggcgccaacgaccaaaacgccaacggcggcgccaacggcagcaacgggaacaacaggggcggcagagccaaccggccccagacatga

SEQ ID NO: 262 - protein, 90 aa, Zea mays
MSSWTYCENALFERALATYDRDTPRRWELVAAAVGGGKTAEDARRHYAHLVLDVGDIESGGYGANDQNANGGANGSNGNNRGGRANRPQT

SEQ ID NO: 263 - DNA, 318 bp, Zea mays
atgggttcgtcctggaccgagagtcaaaacaatctcttcgagcgtgcgctggcagtatatgacaaggacacaccagaccgctggcacaacgttgcgcgggcagtcggctgcggcaagacagccgaggacgtgaagaggcactacaagtacctgaagacggacgtgaagcacatcgaaaccgaagaaggcggccgaggatcccagtccagcagccctgctggtgctggtgctggtggcagtggaagcagcagcagcagttcttggggcagggacaacggtgacaagaggatgacgaggcaccccaaccagccgcagtga

SEQ ID NO: 264 - protein, 105 aa, Zea mays
MGSSWTESQNNLFERALAVYDKDTPDRWHNVARAVGCGKTAEDVKRHYKYLKTDVKHIETEEGGRGSQSSSPAGAGAGGSGSSSSSSWGRDNGDKRMTRHPNQPQ

SEQ ID NO: 265 - DNA, 264 bp, Zea mays
atgtctgagtccaggagctctttccgcaacgttaacactgattgcaactggagcaaaaaggagaacaagctgttcgaggaggccctagcccgctatcgcgagggcacacctgaccgctggctcaaggtgtcccgtgccatgggtggcatcaagacagccgatgaagtccgccgtcattatgagatccttaatgaggatgtcacactcattgtatctggcggaattccattccccaactacaacacacagggagcttggaactga

SEQ ID NO: 266 - protein, 87 aa, Zea mays
MSESRSSFRNVNTDCNWSKKENKLFEEALARYREGTPDRWLKVSRAMGGIKTADEVRRHYEILNEDVTLIVSGGIPFPNYNTQGAWN

SEQ ID NO: 267 - DNA, 267 bp, Zea mays
atgtctgggtccaggagctcttcgtctcacaacgttaccattgattccgagtggagcaaaaaggagaacaagctgttcgaggaggccctagcctgctacggcgcgggcacacccgaccgctggcacaaggtggcccgtgccatgggtggcatcaagacagccgacgaggttcgccgccatcacgagatccttaatgaggatgtcacgctcatcgaatccggcagagttccattccccaactacaacacgcagggagcttggaactaa

SEQ ID NO: 268 - protein, 88 aa, Zea mays
MSGSRSSSSHNVTIDSEWSKKENKLFEEALACYGAGTPDRWHKVARAMGGIKTADEVRRHHEILNEDVTLIESGRVPFPNYNTQGAWN

SEQ ID NO: 269 - DNA, 282 bp, Zea mays
tattgctagtagtaattctaattcacatgcgtgcttgaacagataatccgtccgacccactcgcttggcttgcttcttttgtagccacacgtgcttcttttttttggcgcgaagtgtacgtatgtaggacgtacttgttcagtggttctcatgatgcttgcctgccgcctagatcttcaggtcaggtgcttcagcctgtcgctgtcggcgtcgtcgtagccgccggggcacctgtacgcggggaaggccaccttgccggcctcgatgtgctccaagtccttc

SEQ ID NO: 270 - protein, 93 aa, Zea mays
MASMSLSSSRAQWTAKQNKLFEQALAVYDRDTPDRWHNIARAVGGKSADEVRRYYELLVKDLEHIEAGKVAFPAYRCPGGYDDADSDRLKHLT

SEQ ID NO: 271 - DNA, 291 bp, Zea mays
atggcgtcgctctcgatgacgacgagcgcagcggcccgcgcgcagtggacgcctaggcagaacaagctgttcgagcaggcgctggcggtgtacgacaaggacacgcccgaccgctggcacaacatcgcctgcgccgtcggcggcgggaagtccgcggacgacgtcaggcgctactacgagctgctggaggaggacgtcggccacatcgagtccggcaaggtgcccttccccgcctaccgctaccccgccggctacggggccgccgacaggctgaaacagctgaagatctag

SEQ ID NO: 272 - protein, 96 aa, Zea mays
MASLSMTTSAAARAQWTPRQNKLFEQALAVYDKDTPDRWHNIACAVGGGKSADDVRRYYELLEEDVGHIESGKVPFPAYRYPAGYGAADRLKQLKI

SEQ ID NO: 273 - DNA, 264 bp, Zea mays
ccaatgaatacatgtggttatcaatcttatgtacactaggatcctacaaccacaggtagacagacataaacttgatcataaactatactatacacatattgacatatacacactggttcatcattttattctccaaccagagctggatttcctttggttccttcttggatccgtagagctttgttttctgcctctttgagcctccaacattttttaacctcgggtccagaatccctgtgtcttgtacttggggtacggcacatt

SEQ ID NO: 274 - protein, 87 aa, Zea mays
MSASWSSSPNSMSQWSQKENKMFEEALAYYGEGTPNRWDKVSSAMGGIKSAEEVRCHYENLDYDVKMIESGNVPYPKYKTQGFWTRG

SEQ ID NO: 275 - DNA, 258 bp, Zea mays
atgtccgcctcacgcagctcctctcccaactccatctcacagtggagccagaaagagaacaagatgtttgaagaggcactcgcatactacggcgagggcacacccaaccggtgggacaaggtgtccagagccatgggaggcatcaagtctgctgaggaggtgcgctgccactatgaagatcttgactacgacgtcaagatgattgaatcaggccacgtgccgtaccccaagtacaagacacatggattctggacctga

SEQ ID NO: 276 - protein, 85 aa, Zea mays
MSASRSSSPNSISQWSQKENKMFEEALAYYGEGTPNRWDKVSRAMGGIKSAEEVRCHYEDLDYDVKMIESGHVPYPKYKTHGFWT

SEQ ID NO: 277 - DNA, 342 bp, Zea mays
tgggtacacacatgagggtaaagagacgataattcttcttccttattttcggcatatcggtcgttgcaaaggggaaacgactgtcatatatgcatgcacgtacgcatgcatgcgtatatatatcacccccggcccatggacgtaccgtacgtatcatcggagagtagccattcgtcttcatcgctggaacttcggatactgcttggctctcgtggcggcggccatgtcgtcgtcgaggccggcgccggcgacgggcgccggcgcgctgccgtggtagctgttgtagctgctgtagcgggggaaggggacgcggccggcctcgatctgggtgacgtcgtggac

SEQ ID NO: 278 - protein, 113 aa, Zea mays
MASGGGSSSSRAWTQRQNKQFECALAVYDREAPDRWHNIARYMGGTKSADEVRRHFEHLVHDVTQIEAGRVPFPRYSSYNSYHGSAPAPVAGAGLDDDMAAATRAKQYPKFQR

SEQ ID NO: 279 - DNA, 240 bp, Zingiber officinale
atggcgtcgagttcgatgagcgcgtcgtggaccgcgaaggagaacaagatgttcgagaaggcgttggcagtgttcgaccgcgacacgccggaccggtggcacaagatcgctcacgccatgggtggcaagacggcggaggaagtgaagcgccattatgatctgcttgttgaggacgtccgtcgcatcgaagccggccaaatgccttatgccaattacaggtcctccaaccgcagaggttga

SEQ ID NO: 280 - protein, 79 aa, Zingiber officinale
MASSSMSASWTAKENKMFEKALAVFDRDTPDRWHKIAHAMGGKTAEEVKRHYDLLVEDVRRIEAGQMPYANYRSSNRRG

SEQ ID NO: 281 - DNA, 243 bp, Zingiber officinale
atggcgtcagggtcgctatcccgcagctcctctggctcctcctcatggacggagcagcagaataagctcttcgagcgcgcactggcagtctacgacaaggacactcccaaccggtggcacaacgtggcccgcgccgtcggcggcggtaagaccgccgaggaggtcaaatcccactacgacctgctcatcgaggatctcaaccccaaaaaatccggccgagtcccctacccaaactacaaatag

SEQ ID NO: 282 - protein, 80 aa, Zingiber officinale
MASGSLSRSSSGSSSWTEQQNKLFERALAVYDKDTPNRWHNVARAVGGGKTAEEVKSHYDLLIEDLNPKKSGRVPYPNYK

SEQ ID NO: 283 - protein, 30 aa, Artificial sequence
  motif 1
  VARIANT (2)..(2): / replace = "Ser"
  VARIANT (3)..(3): / replace = "Ala"
  VARIANT (5)..(5): / replace = "Glu"
  VARIANT (8)..(8): / replace = "Ala"
  VARIANT (11)..(11): / replace = "Lys"
  VARIANT (18)..(18): / replace = "Arg"
  VARIANT (19)..(19): / replace = "Glu"
  VARIANT (25)..(25): / replace = "Ser" / replace = "Gln"
  VARIANT (27)..(27): / replace = "Ile"
  VARIANT (29)..(29): / replace = "Lys"
WTPKQNKLFERALAVYDKDTPDRWHNVARA

SEQ ID NO: 284 - protein, 15 aa, Artificial sequence
  motif 2
  VARIANT (4)..(4): / replace = "Thr"
  VARIANT (5)..(5): / replace = "Val"
  VARIANT (6)..(6): / replace = "Asp"
  VARIANT (9)..(9): / replace = "Arg"
  VARIANT (14)..(14): / replace = "Leu"
GGKSAEEVKRHYEIL

SEQ ID NO: 285 - protein, 15 aa, Artificial sequence
  motif 3
  VARIANT (2)..(2): / replace = "Leu"
  VARIANT (3)..(3): / replace = "Phe"
  VARIANT (4)..(4): / replace = "Phe"
  VARIANT (6)..(6): / replace = "Asp"
  VARIANT (7)..(7): / replace = "Asn"
  VARIANT (9)..(9): / replace = "Met"
  VARIANT (14)..(14): / replace = "Lys"
DVKHIESGRVPFPNY

SEQ ID NO: 286 - protein, 32 aa, Artificial sequence
  motif 4
  VARIANT (2)..(2): / replace = "Ser"
  VARIANT (3)..(3): / replace = "Val" / replace = "Thr"
  VARIANT (4)..(4): / replace = "Gln"
  VARIANT (5)..(5): / replace = "Gln" / replace = "Asp"
  VARIANT (6)..(6): / replace = "Ser"
  VARIANT (8)..(8): / replace = "Ala"
  misc_feature (11)..(11): Xaa can be any naturally occurring amino acid
  VARIANT (12)..(12): / replace = "Val"
  VARIANT (15)..(15): / replace = "Val" / replace = "Thr"
  VARIANT (16)..(16): / replace = "Tyr"
  VARIANT (18)..(18): / replace = "Arg" / replace = "Gln"
  VARIANT (19)..(19): / replace = "Glu"
  VARIANT (20)..(20): / replace = "Ser"
  VARIANT (21)..(21): / replace = "Ala" / replace = "Arg" / replace = "Cys"
  VARIANT (22)..(22): / replace = "Asp" / replace = "Asn"
  misc_feature (25)..(25): Xaa can be any naturally occurring amino acid
  VARIANT (26)..(26): / replace = "Asp"
  VARIANT (29)..(29): / replace = "Lys" / replace = "Gln" / replace = "His"
  VARIANT (30)..(30): / replace = "Val"
  VARIANT (31)..(31): / replace = "Ile"
  VARIANT (32)..(32): / replace = "Glu" / replace = "Ala"
WTAKENKDFEXALAEFDKDTPERWXNVARAVG

SEQ ID NO: 287 - protein, 13 aa, Artificial sequence
  motif 5
  VARIANT (2)..(2): / replace = "Pro" / replace = "Ala" / replace = "Thr"
  VARIANT (3)..(3): / replace = "Asp"
  VARIANT (4)..(4): / replace = "Asp"
  VARIANT (5)..(5): / replace = "Ala"
  misc_feature (7)..(7): Xaa can be any naturally occurring amino acid
  VARIANT (8)..(8): / replace = "Gln"
  VARIANT (10)..(10): / replace = "Asp"
  VARIANT (11)..(11): / replace = "Ile" / replace = "Leu" / replace = "His"
  VARIANT (13)..(13): / replace = "Val"
TVEEVKXHYEVLL

SEQ ID NO: 288 - protein, 9 aa, Artificial sequence
  motif 6
  VARIANT (2)..(2): / replace = "Asp"
  VARIANT (3)..(3): / replace = "Asn"
  VARIANT (4)..(4): / replace = "Asp"
  misc_feature (5)..(5): Xaa can be any naturally occurring amino acid
  VARIANT (7)..(7): / replace = "Ala"
  VARIANT (8)..(8): / replace = "Phe" / replace = "Tyr"
IESGXVPLP

SEQ ID NO: 289 - DNA, 2194 bp, Oryza sativa
aatccgaaaagtttctgcaccgttttcaccccctaactaacaatatagggaacgtgtgctaaatataaaatgagaccttatatatgtagcgctgataactagaactatgcaagaaaaactcatccacctactttagtggcaatcgggctaaataaaaaagagtcgctacactagtttcgttttccttagtaattaagtgggaaaatgaaatcattattgcttagaatatacgttcacatctctgtcatgaagttaaattattcgaggtagccataattgtcatcaaactcttcttgaataaaaaaatctttctagctgaactcaatgggtaaagagagagattttttttaaaaaaatagaatgaagatattctgaacgtattggcaaagatttaaacatataattatataattttatagtttgtgcattcgtcatatcgcacatcattaaggacatgtcttactccatcccaatttttatttagtaattaaagacaattgacttatttttattatttatcttttttcgattagatgcaaggtacttacgcacacactttgtgctcatgtgcatgtgtgagtgcacctcctcaatacacgttcaactagcaacacatctctaatatcactcgcctatttaatacatttaggtagcaatatctgaattcaagcactccaccatcaccagaccacttttaataatatctaaaatacaaaaaataattttacagaatagcatgaaaagtatgaaacgaactatttaggtttttcacatacaaaaaaaaaaagaattttgctcgtgcgcgagcgccaatctcccatattgggcacacaggcaacaacagagtggctgcccacagaacaacccacaaaaaacgatgatctaacggaggacagcaagtccgcaacaaccttttaacagcaggctttgcggccaggagagaggaggagaggcaaagaaaaccaagcatcctccttctcccatctataaattcctccccccttttcccctctctatataggaggcatccaagccaagaagagggagagcaccaaggacacgcgactagcagaagccgagcgaccgccttctcgatccatatcttccggtcgagttcttggtcgatctcttccctcctccacctcctcctcacagggtatgtgcctcccttcggttgttcttggatttattgttctaggttgtgtagtacgggcgttgatgttaggaaaggggatctgtatctgtgatgattcctgttcttggatttgggatagaggggttcttgatgttgcatgttatcggttcggtttgattagtagtatggttttcaatcgtctggagagctctatggaaatgaaatggtttagggatcggaatcttgcgattttgtgagtaccttttgtttgaggtaaaatcagagcaccggtgattttgcttggtgtaataaagtacggttgtttggtcctcgattctggtagtgatgcttctcgatttgacgaagctatcctttgtttattccctattgaacaaaaataatccaactttgaagacggtcccgttgatgagattgaatgattgattcttaagcctgtccaaaatttcgcagctggcttgtttagatacagtagtccccatcacgaaattcatggaaacagttataatcctcaggaacaggggattccctgttcttccgatttgctttagtcccagaattttttttcccaaatatcttaaaaagtcactttctggttcagttcaatgaattgattgctacaaataatgcttttatagcgttatcctagctgtagttcagttaataggtaatacccctatagtttagtcaggagaagaacttatccgatttctgatctccatttttaattatatgaaatgaactgtagcataagcagtattcatttggattattttttttattagctctcaccccttcattattctgagctgaaagtctggcatgaactgtcctcaattttgttttcaaattcacatcgattatctatgcattatcctcttgtatctacctgtagaagtttctttttggttattccttgactgcttgattacagaaagaaatttatgaagctgtaatcgggatagttatactgcttgttcttatgattcatttcctttgtgcagttcttggtgtagcttgccactttcaccagcaaagttc

SEQ ID NO: 290 - DNA, 55 bp, Artificial sequence
  primer: prm10562
ggggacaagtttgtacaaaaaagcaggcttaaacaatgagctcgatgtcgtctca

SEQ ID NO: 291 - DNA, 51 bp, Artificial sequence
  primer: prm10563
ggggaccactttgtacaagaaagctgggtaagtgttaggttttgctccttt

SEQ ID NO: 292 - DNA, 1338 bp, Oryza sativa
atgaaccagttcgtccctgattggaacaccaccagcatgggcgacggctttgcgccattaggcgaagacgacgggctcgtcgagctgctatggtgcaatggccacgtcgtcatgcagagccaggcgccgcggaagccgccgaggccggagaagacgacggcggcggcggcggcggcgatggcggaggatgagtcggcgtcgtggtttcagtacccggtcgacgacgtgcttgagaaggacctgttcaccgagctgttcggcgaaatgacggcggccggcggcggcggcggcgacgtccgcagggcggcgtgcaaggaggagcgcggcgcggtcgccgcgttccagagcaggatgatgccgccgccgtggccggcgagggggaaggcggagttcggtgacgtcgacgacgtgtgcggcgtctcggaggtcgtcatggcgaagatggacggggcggcggcggcggagacggtcggcgagtcatcgatgctgacaatcgggtcgagcatctgcgggagcaaccacgtccagacgccgccggtggggaacgggaaggccggcgccggcaccgccggcgccgccagaagggcgcacgacacggcgacggtggcgtcgtcgtcgatgaggtcgaggtcctgcaccgccaaggccgagccgcgcgacgtcgcagccgccggcgtcggcggcaagcggaagcagcgcggcggcgccgccatggagtccgggagccccagcgaggacgtggagttcgagtccgccgccgcaacgtgctcgccggcgcagaagacgacgacggcgaagcggcggcgcgccgccgaggtgcacaacctctccgagaggaggagaagagataggatcaatgagaagatgaaagcattacaggagctcatacctcactgcaacaaaacggacaaagcatcgatgctggatgaagcgatcgagtatctcaagtcactgcagctccagctacagatgatgtggatgggcggcggaatggcgccgccggcggtgatgttcccggcggccggcgtgcaccagtacatgcagcggatgggcgccgtcgggatgggcccaccacacatggcgtccctgccgaggatgccgccgttcatggcgccgccgcccgccgccgtgcagagctcgccggtggtcagcatggccgacccctacgcccgctgcctcgccgtcgaccacctccagccaccgcctccgatgcattacctgcaggggatgagcttctaccagctcgccgcggccaagaaccttcagcagcagcagaacacggcggaggcgccgccaccgccaccggccggaggcaaccgcgcagccgctgactcctga

SEQ ID NO: 293 - protein, 445 aa, Oryza sativa
MNQFVPDWNTTSMGDGFAPLGEDDGLVELLWCNGHVVMQSQAPRKPPRPEKTTAAAAAAMAEDESASWFQYPVDDVLEKDLFTELFGEMTAAGGGGGDVRRAACKEERGAVAAFQSRMMPPPWPARGKAEFGDVDDVCGVSEVVMAKMDGAAAAETVGESSMLTIGSSICGSNHVQTPPVGNGKAGAGTAGAARRAHDTATVASSSMRSRSCTAKAEPRDVAAAGVGGKRKQRGGAAMESGSPSEDVEFESAAATCSPAQKTTTAKRRRAAEVHNLSERRRRDRINEKMKALQELIPHCNKTDKASMLDEAIEYLKSLQLQLQMMWMGGGMAPPAVMFPAAGVHQYMQRMGAVGMGPPHMASLPRMPPFMAPPPAAVQSSPVVSMADPYARCLAVDHLQPPPPMHYLQGMSFYQLAAAKNLQQQQNTAEAPPPPPAGGNRAAADS

SEQ ID NO: 294 - DNA, 1437 bp, Arabidopsis thaliana
atgcatcattttgtccctgacttcgataccgatgatgattatgtcaacaaccataattcttctttgaatcatcttcctagaaaatccattactactatgggtgaagatgatgatcttatggagcttttatggcagaacggtcaagttgttgttcaaaaccagagacttcacaccaagaaaccttcttcttctccaccgaagcttcttccttctatggatcctcagcagcaaccttcttcagatcagaatctttttattcaagaagatgaaatgacttcttggcttcattatcctctccgtgacgatgatttctgctcagatcttctcttctccgccgcacctactgcgacggctaccgcgacggtgagtcaagtcaccgccgcgagaccgccagtatcttcgacgaatgagtcgaggccgccggtgaggaacttcatgaatttctcgaggctgagaggggattttaataacggtagaggtggtgaatctggaccgttgctttcgaaggcggttgtgagagaatctacgcaggtaagtcctagcgcaacaccgtcggcggcggcgagtgaatccggtttaacacggcggacggatggtactgacagttccgccgtagctggaggcggcgcgtataatcggaagggaaaagcagtggctatgacggcgccggcgatcgagataaccggtacatcgtcatctgtagtgtcaaagagcgaaatcgaaccggagaagacgaacgtcgatgataggaaacgaaaagagagagaagccaccactactgatgaaactgaatcccgtagcgaggaaacaaaacaagcacgtgtatcaacaacatctaccaagagatctcgtgctgctgaagttcataatctctctgaaagaaaacggagagataggatcaatgagagaatgaaagctttgcaagaacttatacctcgctgcaacaagtcagataaagcttcgatgctagatgaagctattgagtacatgaaatctcttcagcttcaaatacagatgatgtcaatgggatgtggaatgatgccaatgatgtatccgggcatgcaacagtacatgcctcatatggcgatgggtatgggtatgaaccagcctattcctcctccttccttcatgccattccccaacatgttagccgctcaaagacctttgcctacacaaactcacatggccgggtcaggaccgcaataccctgttcatgcttctgacccgtcaagagtctttgtaccgaaccagcagtatgatccaacctcgggccagcctcagtatccagctggttacacggatccatatcagcagttccgcggtctccacccgacccaaccacctcagtttcagaatcaagcaacatcgtacccaagttcgagcagggtgagtagtagtaaggaatctgaggatcacggaaaccacacaacaggttaa

SEQ ID NO: 295 - protein, 478 aa, Arabidopsis thaliana
MHHFVPDFDTDDDYVNNHNSSLNHLPRKSITTMGEDDDLMELLWQNGQVVVQNQRLHTKKPSSSPPKLLPSMDPQQQPSSDQNLFIQEDEMTSWLHYPLRDDDFCSDLLFSAAPTATATATVSQVTAARPPVSSTNESRPPVRNFMNFSRLRGDFNNGRGGESGPLLSKAVVRESTQVSPSATPSAAASESGLTRRTDGTDSSAVAGGGAYNRKGKAVAMTAPAIEITGTSSSVVSKSEIEPEKTNVDDRKRKEREATTTDETESRSEETKQARVSTTSTKRSRAAEVHNLSERKRRDRINERMKALQELIPRCNKSDKASMLDEAIEYMKSLQLQIQMMSMGCGMMPMMYPGMQQYMPHMAMGMGMNQPIPPPSFMPFPNMLAAQRPLPTQTHMAGSGPQYPVHASDPSRVFVPNQQYDPTSGQPQYPAGYTDPYQQFRGLHPTQPPQFQNQATSYPSSSRVSSSKESEDHGNHTTG

SEQ ID NO: 296 - DNA, 1293 bp, Arabidopsis thaliana
atggaacaccaaggttggagttttgaggagaattatagtttgtccactaatagaagatctatcaggccacaagatgaactagtggagttattatggcgagatggacaagtggttctgcagagccaaactcatagagaacaaacccaaacccagaaacaagatcatcatgaagaagccctaagatccagcacctttcttgaagatcaagaaactgtctcttggatccaataccctccagatgaagacccattcgaacccgacgacttctcctcccacttcttctcaaccatggatcccctccagagaccaacctcagagacggttaagcctaagtccagtcctgaacctcctcaagtcatggttaagcctaaggcctgtcctgaccctcctcctcaagtcatgcctcctccaaaatttaggttaacaaattcatcatcggggattagggaaacagaaatggaacagtactcggtaacgaccgttggacctagccattgcggaagcaacccatcacagaacgatctcgatgtctcaatgagtcatgatcgaagcaaaaacatagaagaaaagcttaatccgaacgcaagttcctcatcaggtggctcctctggttgcagctttggcaaagatatcaaagaaatggctagtggaagatgcatcacaaccgaccgtaagagaaaacgtataaatcacactgacgaatctgtatctctatcagatgcaatcggtaacaagtcgaaccaacgatcaggatcaaaccgaaggagtcgagcagctgaagttcataatctctccgaaaggaggaggagagataggatcaatgagagaatgaaggctttgcaagaactaatacctcactgcagtaaaactgataaagcttcgattttagacgaagccatagattatttgaaatcacttcagttacagcttcaagtgatgtggatggggagtggaatggcggcggcggcggcttcggctccgatgatgttccccggagttcaacctcagcagttcatacgtcagatacagagcccggtacagttacctcgatttccggttatggatcagtctgcaattcagaacaatcccggtttagtttgccaaaacccggtacaaaaccagatcatctccgaccggtttgctagatacatcggtgggttcccacacatgcaggccgcgactcagatgcagccgatggagatgttgagatttagttcaccggcgggacagcaaagtcaacaaccgtcgtctgtgccgacgaagaccaccgacggttctcgtttggaccactag

SEQ ID NO: 297 - protein, 430 aa, Arabidopsis thaliana
MEHQGWSFEENYSLSTNRRSIRPQDELVELLWRDGQVVLQSQTHREQTQTQKQDHHEEALRSSTFLEDQETVSWIQYPPDEDPFEPDDFSSHFFSTMDPLQRPTSETVKPKSSPEPPQVMVKPKACPDPPPQVMPPPKFRLTNSSSGIRETEMEQYSVTTVGPSHCGSNPSQNDLDVSMSHDRSKNIEEKLNPNASSSSGGSSGCSFGKDIKEMASGRCITTDRKRKRINHTDESVSLSDAIGNKSNQRSGSNRRSRAAEVHNLSERRRRDRINERMKALQELIPHCSKTDKASILDEAIDYLKSLQLQLQVMWMGSGMAAAAASAPMMFPGVQPQQFIRQIQSPVQLPRFPVMDQSAIQNNPGLVCQNPVQNQIISDRFARYIGGFPHMQAATQMQPMEMLRFSSPAGQQSQQPSSVPTKTTDGSRLDH

SEQ ID NO: 298 - DNA, 1329 bp, Arabidopsis thaliana
atggaacaagtgtttgctgattggaattttgaagataattttcacatgtccactaataaaagatcaatcagaccagaagatgaattagtggagctattgtggagagatggtcaagtggttttacaaagccaagctcgtagagaaccgtcagtccaagtccaaacccacaaacaagaaaccctaagaaaacccaacaatatttttcttgacaaccaagaaacagtacaaaagcctaactacgctgctctagatgatcaagaaaccgtctcctggatacaataccctccggatgacgtcatcgaccctttcgaatccgagttctcctctcatttcttctcttcgatcgatcacctcggaggtcctgagaagccacgaacgatcgaagagacagttaagcatgaggctcaagccatggctcctcctaagtttagatcctcggttataacagtcggaccgagtcattgcggcagcaaccagtcaacaaatattcatcaggccactacacttccggtttctatgagtgatagaagcaagaacgtcgaagaaagacttgacacttcgtcaggtggctcctccggttgcagctatggaaggaacaacaaagaaaccgttagtggaacaagtgtaaccattgaccgtaaaagaaaacatgttatggatgctgatcaagaatctgtgtctcaatcagatataggtttgacctcaaccgatgatcaaaccatgggtaacaaatcgagccaacggtcaggatctactcgaagaagccgtgcagctgaagttcataatctctcagaaaggaggaggagagatcggatcaatgaaagaatgaaagctcttcaagaactcatacctcactgcagcagaacagataaagcttcgatattggatgaagcaattgattacttaaaatcacttcaaatgcaactccaagtgatgtggatgggaagtggaatggcggcggcggcagcagcagcagcaagtccgatgatgtttcccggggtacaatcatctccatacattaatcagatggctatgcaaagtcagatgcaattgtctcaattcccggttatgaaccggtccgctccgcagaaccatcccggtttagtatgtcaaaacccggtacagttgcagctccaagcacagaaccaaatcttatcggagcagctcgctaggtacatgggcgggattccccagatgccgccggcgggaaatcagaccgtgcaacaacaaccagcggacatgttgggatttggatctccggcgggaccgcaaagtcaactgtcggcaccggcgaccaccgacagtcttcatatgggtaaaataggctga

SEQ ID NO: 299 - protein, 442 aa, Arabidopsis thaliana
MEQVFADWNFEDNFHMSTNKRSIRPEDELVELLWRDGQVVLQSQARREPSVQVQTHKQETLRKPNNIFLDNQETVQKPNYAALDDQETVSWIQYPPDDVIDPFESEFSSHFFSSIDHLGGPEKPRTIEETVKHEAQAMAPPKFRSSVITVGPSHCGSNQSTNIHQATTLPVSMSDRSKNVEERLDTSSGGSSGCSYGRNNKETVSGTSVTIDRKRKHVMDADQESVSQSDIGLTSTDDQTMGNKSSQRSGSTRRSRAAEVHNLSERRRRDRINERMKALQELIPHCSRTDKASILDEAIDYLKSLQMQLQVMWMGSGMAAAAAAAASPMMFPGVQSSPYINQMAMQSQMQLSQFPVMNRSAPQNHPGLVCQNPVQLQLQAQNQILSEQLARYMGGIPQMPPAGNQTVQQQPADMLGFGSPAGPQSQLSAPATTDSLHMGKIG

SEQ ID NO: 300 - DNA, 1689 bp, Glycine max
atgaacaacagtattcctggttgggattttgagagtgatacatgtctcaccaaccaaagaaagctcatagggccggaccaagaacttgtagagctcctatggaaaaatgggcaagtagttatgcacaaccaaacacataggaagacacttgggaattcatctaacttgagacaggtgcagaaaagtgatcaatcagtattaaggtctagcggtccctatggaaactcaagcaacttggatcaagaagatgccgccccatgggtccaattcccacttgaggacccattggaacaagatttttgttcaaaccttttatctgaactaccaacttgtgaatttgaatcttacaagccaatcaggcaattggaagaggaaaagtttgccaaattttttgcttccggtaccccccatcatcctacaacttcaagttcacaaccactaccacctaacatgaaaccctcatgtattcagggactccaagggaatcctattcctatgccagctccaagatttcatggtcctgattcatctcagaaaatccatgactttggagcatcacgaaaggttctaaattttcctcagttttcaacaccccgtaataatgttccatcagcacctggtattacacagtttagagagaaaactactgctaacatgtcacaaagtgaggctagagagtactcagtgatcacagttggttcaagtcactgtggcagcaatcacatccctcaggagcaagatgtaagcaggatttcaagcactggtgtttgggccactactaataataatactactttatctgctgagcctgaagctgtcagagattatgtccaaagaccgatttgtcctaagagtggccaaggaaaatcagagatgattgaactaactgtgacttcatcttccggtggctcgggaagtactggtatcggaagaacctgttccctatcaacaagagatcatggccaaaagagaaaagggacagaagaagaagcgttagaggaacaaagtgaggacacagaacttaaatcagctgatggaaacaaggcttctcagcggacgaggtcttccagaaggaaccgtgcagcagaagtgcataatcaatcagaaaggagaagaagagataggatcaacgagaagatgaggacattgcagcaactgatacctaatagtaacaagacagacaaagcatcaatgttagaagaggcaatcgaatacttgaaatcacttcagtttcagcttcaggttatgtggatggggggtggcatgacaccagtgatgttcccaggaattcagcactatatgtcacaaatgggtatgggaatgggtgcaccttctttgccttccattcacaacccgatgcaattgccaaaagtgccacatgatcaagccatgtctgtgcttcagataccaaaccagaatttaatgtgtcaaaatccagttttgggtgcctttaactaccaaaaccagatgcagaacccgtgccttccagaacaatatgcacgttacatgggttaccatcttatgcaaaatgcctctcagcctatgaatgtgttcagatatggttcccaagcagtgcaacacagtcaaacgatgattgcaccaggcaataatagcagcggacccatgagtggaacagctaatattgatgatgctgacagtggcaaagcgggttcttccacctttaattga

SEQ ID NO: 301 - protein, 562 aa, Glycine max
MNNSIPGWDFESDTCLTNQRKLIGPDQELVELLWKNGQVVMHNQTHRKTLGNSSNLRQVQKSDQSVLRSSGPYGNSSNLDQEDAAPWVQFPLEDPLEQDFCSNLLSELPTCEFESYKPIRQLEEEKFAKFFASGTPHHPTTSSSQPLPPNMKPSCIQGLQGNPIPMPAPRFHGPDSSQKIHDFGASRKVLNFPQFSTPRNNVPSAPGITQFREKTTANMSQSEAREYSVITVGSSHCGSNHIPQEQDVSRISSTGVWATTNNNTTLSAEPEAVRDYVQRPICPKSGQGKSEMIELTVTSSSGGSGSTGIGRTCSLSTRDHGQKRKGTEEEALEEQSEDTELKSADGNKASQRTRSSRRNRAAEVHNQSERRRRDRINEKMRTLQQLIPNSNKTDKASMLEEAIEYLKSLQFQLQVMWMGGGMTPVMFPGIQHYMSQMGMGMGAPSLPSIHNPMQLPKVPHDQAMSVLQIPNQNLMCQNPVLGAFNYQNQMQNPCLPEQYARYMGYHLMQNASQPMNVFRYGSQAVQHSQTMIAPGNNSSGPMSGTANIDDADSGKAGSSTFN

SEQ ID NO: 302 - DNA, 1446 bp, Glycine max
atggagctgctatggcacaacggccaggtcgtggtgcagagtcagaaccaacgttctctgagaaaacttccgccggtgaccaactcccacgacgcctctcccgccggtccttcaatgacgagagagattcgaccgctggtggagaatttcaatcagcatctcttcatgcacgaaggcgaaatggcttcgtggcttcactatcctatcgacgacgacgagcctgccttcatgcaaaccctcggccacacgtctcagctcacggagctccggccgatgtcggcgaatccacggcctccgattccgcccccgagaaggccggaacagaggacgccgaacttcgcgtacttctcgaggcacaacacgagagccgcggagccgagcgtgaaggccgccgcgagggaatccacggtggtggattcgtgcgatacggaggcggcggcttcgagagtttcggagacagtaaggagcgcggcggaaggaggtgccggcgttgcggcgccttcgacgagtgccggcggtggaaggagcacgatgatgtacgatttgacgatgacgtcatcgcctggcggttcgagtagctgcgacgagccggttcaggtagcggcggcggaggaggatcggaagcggaagggacgggaggcggaggaatgggagtgtcagagcgagttacaaattccctgtaccctggtatacgctaacgtgcgctgggtgagtgacgtgggtttacgtgagcactccccgcgctgctgcatttatttcggtgctgtggccttgtgctcttttggtacggtcatcactttcaccgtcgtggctgcgcacgtgcaagcaaagaagcaagtttgtggatcaacatctacaaagagatcccgtgctgccgaggtccataatctctctgagaggaggcgtcgcgatcggattaatgaaaagatgaaagctctgcaagaacttatacctcgttgcaataagtcggacaaagcttcaatgctggatgaagcaatttcgtacttgaagtcattgcagttacaagtgcagatgatgtccatgggatgtggaatggtacctgtgatgtttcctggaatccagcagtacatgccagcaatgggaatgggggttggaatgggtatgggtatggaaatgggaatgaacagacctgtaatgccgtttcccaatatgttacctggttcggctttgccagcggcaactgcagctgctgctcatttgggaccaagaatgcaagcagcaaatcagtcagataataatatggtcacgtcagctggtccacctgatccaaatcagtcacgtatcccaaacttcactgatccttatcaacaatatcttggtccccaccagatgcagttccaattaattcagaatcaggcaatgaaccaaccaaatgttagcaagccaagtaacaatgggggccctgcgaatccagaaaaccattag

SEQ ID NO: 303 - protein, 481 aa, Glycine max
MELLWHNGQVVVQSQNQRSLRKLPPVTNSHDASPAGPSMTREIRPLVENFNQHLFMHEGEMASWLHYPIDDDEPAFMQTLGHTSQLTELRPMSANPRPPIPPPRRPEQRTPNFAYFSRHNTRAAEPSVKAAARESTVVDSCDTEAAASRVSETVRSAAEGGAGVAAPSTSAGGGRSTMMYDLTMTSSPGGSSSCDEPVQVAAAEEDRKRKGREAEEWECQSELQIPCTLVYANVRWVSDVGLREHSPRCCIYFGAVALCSFGTVITFTVVAAHVQAKKQVCGSTSTKRSRAAEVHNLSERRRRDRINEKMKALQELIPRCNKSDKASMLDEAISYLKSLQLQVQMMSMGCGMVPVMFPGIQQYMPAMGMGVGMGMGMEMGMNRPVMPFPNMLPGSALPAATAAAAHLGPRMQAANQSDNNMVTSAGPPDPNQSRIPNFTDPYQQYLGPHQMQFQLIQNQAMNQPNVSKPSNNGGPANPENH

SEQ ID NO: 304 - DNA, 1545 bp, Glycine max
atgaacaacagtgttcctgattggaattttgggagtgattcctgtgtcacctccaccaatcaaaagaagcccatgatgggggtggaccaagagcttgtggagcttctgtggcaaaatggccaggtagtgcacagccaaactcatagaaaaccggttgtgaactcaagtaacttgattcaagatgatgagacagtctcatggatccaataccctcttgaggatccattggaacaagaattctgttcaaaccttttgtctgaactggcaccttgtgaagttgagtcctataagcaaatcaagccatttgaagagggaaaatttaccaaattggatgcttctagtgcccctcatgtgactgtaagttcacaattacctaccatgaaatcctcctcttttcaggatttctcaggaattcctataccggccccaagattccatgtttctgattcacctcagaaaaacaataatcacttgggtggatcatgtaaggtccaaaacttctctcacttttcagcaccccttaatgtttcttcagcatcggctaacgtgcattttggagacaaaattactggtaacatgtcaagaaatgagattagggagtgctcattgatgacagttggatcaagttactgtggtagcaatcacatcccccaagatccagatgctagcagggcatcaagcaatggtgtttggactactactttatcagtcgagccagaagctaaggagaaagggaaatcagagatgcttgaaccagctgtgacttcatcatctggtggctcaggtagtagtcttggaaaaacttgttcattatctacgagaaaccagggccaaaaaagaaaaggaatagacgtggaagaatctgaggagcaaagtgaggacacagaacttaaatcagcacttggaaacaagtcatctcaacgcacagggtcggctcgaaggaaccgtgctgctgaagtgcataatctatcggaaaggagaaggagagacaggatcaatgagaagatgaaggcattgcaacaactcatacctcacagtagcaagacagacaaagcatcgatgttggaagaggcaattgaatacttgaaatcacttcagctacaacttcagctaatgtggatgggatctggcatggcaccaataatgtttccaggaattcagcactacatgtcacaaatgggcatgggaatggctagaccgcctttccctcctcctattcataatccgatgcaattaccgagagtgccgcttgataagtctgtatctgcatctcagacaccaaaccagacattaatgtgccaaaatcccattttgggtgcatttaattaccaaaatcagatgcaaaatccagctctttcggagcaatatgtgcgttacatgggctatcatcttatgcaaaatgcctctcagccaatgaatgtattcagatatggtccccagggagtacaacatagtcaaacaatgattacacccagcagcaacagcagtggaaacatgagtggagcagcaaatattgatgaggctgtgagtggcaaaatgggttaa

SEQ ID NO: 305 - protein, 514 aa, Glycine max
MNNSVPDWNFGSDSCVTSTNQKKPMMGVDQELVELLWQNGQVVHSQTHRKPVVNSSNLIQDDETVSWIQYPLEDPLEQEFCSNLLSELAPCEVESYKQIKPFEEGKFTKLDASSAPHVTVSSQLPTMKSSSFQDFSGIPIPAPRFHVSDSPQKNNNHLGGSCKVQNFSHFSAPLNVSSASANVHFGDKITGNMSRNEIRECSLMTVGSSYCGSNHIPQDPDASRASSNGVWTTTLSVEPEAKEKGKSEMLEPAVTSSSGGSGSSLGKTCSLSTRNQGQKRKGIDVEESEEQSEDTELKSALGNKSSQRTGSARRNRAAEVHNLSERRRRDRINEKMKALQQLIPHSSKTDKASMLEEAIEYLKSLQLQLQLMWMGSGMAPIMFPGIQHYMSQMGMGMARPPFPPPIHNPMQLPRVPLDKSVSASQTPNQTLMCQNPILGAFNYQNQMQNPALSEQYVRYMGYHLMQNASQPMNVFRYGPQGVQHSQTMITPSSNSSGNMSGAANIDEAVSGKMG

SEQ ID NO: 306 - DNA, 1302 bp, Glycine max
atggacgacgacgacgaagaatacccaattcccgtctcaaagaaaccctccacgcaaaacgatgagatcatggaactgttatggcaaaacggccaggtcgtgatgcaaaaccaaaaccaacgaccgttcagaaaacaaccgccgacgacggacggcgacggccccattccggcgagggagattcgatcctccgaagcggaaaactacaatagccaacacttgttcatgcaagaagacgaaatggcgtcgtggctgcactatccaatccatgaagatcctcctcccttcgatcaccacgatttctgcgccgacatcctctacccgccgccaaacgccaccgcgagccagaatcaaagcagcgcctccgtgcagtcctccccgacggtagccacggcggagcacgtggaaaccggccgcgcgagcgtcagcgccgccgccggtaaaacccccgcgtcggatggcgggagggagacggcgacgtgcgacgtgaccgtgacgtcatcgcctggcggttcgagcgggagcgctgaaccggttcagagagaaccagtggtgaaccggaagaggaagggaagggaacaagaggaatcggagtatcagagcgaggtaactaaaaagcaagttcgtggttctacatctacgaaaagatctcatgctgcagaagtccataatctctcagagaggaggcgtcgagatagaattaatgagaagatgaaagctttgcaagaacttatacctcggtgcaacaagtctgacaaagcttcaatgctggatgaagcaattgagtacttgaagtcactgcaattacaagtgcagatgatgtccatgggatgtggcatggtacctatgatatttcctggaatccagcagtatatgccaccaatgggaatggggattgggatgggtatgggtatgggcatggaaatgggaatgggaatgaacagatcagtaatgccatttcccaatatgttagctagttcgactttgccagcagcaactgcaactgctcatttgggaccaaggtttcctatgcctcctttccatatgccccatgttgctacacctgattcatccagaatgcaaggagcaaatcacccagataataatatgcttaactcacttggtacactagatccagatcaatcatgtatcccaaacttcactgatccttatcaacagtacctcagtctccaacaggcacagttacaattaatgcagacaatgaaccaaccaaatgtcagcaagcctagtactagtagaggtcaagagaatccagaaaagcatcagtcagacaaaacatga

SEQ ID NO: 307 - protein, 433 aa, Glycine max
MDDDDEEYPIPVSKKPSTQNDEIMELLWQNGQVVMQNQNQRPFRKQPPTTDGDGPIPAREIRSSEAENYNSQHLFMQEDEMASWLHYPIHEDPPPFDHHDFCADILYPPPNATASQNQSSASVQSSPTVATAEHVETGRASVSAAAGKTPASDGGRETATCDVTVTSSPGGSSGSAEPVQREPVVNRKRKGREQEESEYQSEVTKKQVRGSTSTKRSHAAEVHNLSERRRRDRINEKMKALQELIPRCNKSDKASMLDEAIEYLKSLQLQVQMMSMGCGMVPMIFPGIQQYMPPMGMGIGMGMGMGMEMGMGMNRSVMPFPNMLASSTLPAATATAHLGPRFPMPPFHMPHVATPDSSRMQGANHPDNNMLNSLGTLDPDQSCIPNFTDPYQQYLSLQQAQLQLMQTMNQPNVSKPSTSRGQENPEKHQSDKT

SEQ ID NO: 308 - DNA, 2076 bp, Glycine max
atgcctttatatgagttataccggctggccagagagaagcttggtaaagaaactaccagcacacgtgctcctgatcaatgttcctcgccagagaatgatttttttgagctggtttgggagaacggtcagatttcgagccagggtcagtccagtagagttagaaggagcccctcttgcaagagtttgccatctcactgcttaccatctcacagtcccaaggctagggataaagatgtaggatatggtagctacacaaggttggggaaatttggggatttagactctggattaaatgaaattccaatgtcggtgccatccagtgaagtggatttctgtcaagatgaagatgtgttaccttggttggattatccatcaatagatggttctttgcaacaagagtatggttctgatttccttcccgcctcaaacagttttactctattggataaaaaaagtaatggcaatatggcgtttagggattctcagaaaacttctgaagaacaagggaatgttttcaagggttcttcagctggacaggttgagactgccagacctaaagctagtagcaccagtcagttattccccccatcattgcatcagtgtcaaacatcttttgtttcgtctagatccagagcatcagatataactgaaaataacaatacgagtaatgcaaaccaggatgcgtcttatggcaaaattactcatattctatcttcctcaagtgatttttctaacgcaaaggtgcagaagtgtgatccacctatgaatagcaatggttccagttccaccataatgaatttctcccattttgcaaggcctgctgctatggtaagagctaatcttcatagcattggcctgaagtctggtttgtcttcatcaagatcagacagtatggaaatgaagaataaaggtgctgctgcaactagcagcaatcctcctgaatcaattcttgttgattcaagtgttgaatgtttaaaggaaccgatcatacaatgccagcaggttgtggagcaatccaaggctgatgtgaactctttgctgccaaaatctgttgaacagaatgctgtgccttctaagcagtcagagcctgctggtaaagagagtgccgctaagattgatctaattcccaatcaagttcctggtgacaatggcactaaaggacagacagctgctgaaaaaagtaaggagccagcagtagcctcttcctctgtttgctctggcaatggtacagaccaaggttcagaagagccaaatcaaaatttgaagcgaaaaagaaaagacactgacgactctgagtgccatagtgaagatgttgaggaagaatcagctggtgctaaaaagacagctggtgggcgaggaggtgcaggttccaagagaagccgtgcagctgaagtgcataatctatctgaaaggaagcgaagagataggatcaatgagaagatgcgtgcattacaagaactcataccaaattgcaataaggtggataaagcttcaatgctggatgaggcaattgagtatcttaaaacacttcagctccaagttcaaattatgtcaatgggagctggtttatatatgcctccaatgatgttacctgcaggaatgcagcacatgcatgcaccacatatggctccattttcacctatgggtgttggcatgcatatgggatatggtatgggttatgggatgggaatgcctgacatgaatggtggatcttcaagattccctatgattcaggtgccccaaatgcaaggaactcatatccctgttgcacatatgtctggatctacagcttttcatgggatggccagagcaaatcctccagggtttgggcttcctggacaaggacatcccatgccaatgccgcgagctcctatgtttcctttttcaggaggacaaatgccaaatgttgacccacaagttaagcaaagcactggtggccgtgactcaactagtcagatgcctacccagtgtgaagcagcagctgttggatttgagcaatctacgttggctcataataacggtcatgcaaccaaggctaatgacaatggatctgttaatcctggacctggcagataa

SEQ ID NO: 309 - protein, 691 aa, Glycine max
MPLYELYRLAREKLGKETTSTRAPDQCSSPENDFFELVWENGQISSQGQSSRVRRSPSCKSLPSHCLPSHSPKARDKDVGYGSYTRLGKFGDLDSGLNEIPMSVPSSEVDFCQDEDVLPWLDYPSIDGSLQQEYGSDFLPASNSFTLLDKKSNGNMAFRDSQKTSEEQGNVFKGSSAGQVETARPKASSTSQLFPPSLHQCQTSFVSSRSRASDITENNNTSNANQDASYGKITHILSSSSDFSNAKVQKCDPPMNSNGSSSTIMNFSHFARPAAMVRANLHSIGLKSGLSSSRSDSMEMKNKGAAATSSNPPESILVDSSVECLKEPIIQCQQVVEQSKADVNSLLPKSVEQNAVPSKQSEPAGKESAAKIDLIPNQVPGDNGTKGQTAAEKSKEPAVASSSVCSGNGTDQGSEEPNQNLKRKRKDTDDSECHSEDVEEESAGAKKTAGGRGGAGSKRSRAAEVHNLSERKRRDRINEKMRALQELIPNCNKVDKASMLDEAIEYLKTLQLQVQIMSMGAGLYMPPMMLPAGMQHMHAPHMAPFSPMGVGMHMGYGMGYGMGMPDMNGGSSRFPMIQVPQMQGTHIPVAHMSGSTAFHGMARANPPGFGLPGQGHPMPMPRAPMFPFSGGQMPNVDPQVKQSTGGRDSTSQMPTQCEAAAVGFEQSTLAHNNGHATKANDNGSVNPGPGR

SEQ ID NO: 310 - DNA, 1437 bp, Glycine max
atggaactgttatggcaaaacggccaggtcgtgatgcaaagccagaaccaacgacccttcagaaagccgccgcagccgccggaggccaacggcggcgacggcgccatttcggcgagggagattcgatcatctgaagcagaaaactacaataatagccaacacttgttcatgcaagaagacgaaatggcggcgtggctgcactatccaatccacgaagatcctccacccttcgatcaccacgatttcggcgccgacatcttctacccgccgccaaacgccaccgcgagccagaatcgcggcagcgccgccgtgcagtcctcctttcgcacgacagagctctggcatccggctcctcgacctccgattccgccgccgaggcggccggagcatgcgccgagcaggatacacaatttcgcgcacttcacgaagcacggcaatgcgtcgtcgagctcgaaggcggccgcggcggcgcagccgacggtggtggattcttgcgaaacgccggtcgcgacggcggagcacgcggaaaccggccgcgccagagccgccgccggcaaaaccgcggtgtcggacggcgggagagagacggcgacgtgcgacgtgacggtgacgtcatcgcctggcgattcgagcgggagtgccgaaccggtcgagagagaaccgatggcggaccggaagaggaagggaagggaacatgaggaatcggagtttcagagcgaggatgttgattttgaatctcccgaagctaaaaagcaagttcatggttctacatctacaaagagatctcgtgctgcagaagtccataatctctctgagaggcgccgtcgagatagaattaatgaaaagatgaaagctttgcaagaacttatacctaggtgcaacaagtctgacaaagcttcaatgctggatgaagcaattgagtacttgaagtcactgcaattacaagtgcagatgatgtccatgggatatggcatggtacctatgatgtttcctggaatacagcagtatatgccaccaatgggaatggggattgggatggggatgggcatggaaatgggaatgggaatgaacagaccagtaatgccatttaccaatatgttagctagttcgactttgccagcagcaactgcggctgttcatttgggaccaaggtttcctatgcctcctttccatatgccccatgttgctgcacccgattcatccagaatgcaaggagcaaatcacccagataataatatgcttaactcacttggtacactagatccagatcaatcacgtatcccaaacttcactgatccttatcaacagtacctcggtctccaacaggcacagttacaattaatgcagacaatgaaccaacaaaatgtcagcaagcctagtagcagtagaggtcaagagaatccagaaaagcatcagtcaggtaaagtgccattgtag

SEQ ID NO: 311 - protein, 478 aa, Glycine max
MELLWQNGQVVMQSQNQRPFRKPPQPPEANGGDGAISAREIRSSEAENYNNSQHLFMQEDEMAAWLHYPIHEDPPPFDHHDFGADIFYPPPNATASQNRGSAAVQSSFRTTELWHPAPRPPIPPPRRPEHAPSRIHNFAHFTKHGNASSSSKAAAAAQPTVVDSCETPVATAEHAETGRARAAAGKTAVSDGGRETATCDVTVTSSPGDSSGSAEPVEREPMADRKRKGREHEESEFQSEDVDFESPEAKKQVHGSTSTKRSRAAEVHNLSERRRRDRINEKMKALQELIPRCNKSDKASMLDEAIEYLKSLQLQVQMMSMGYGMVPMMFPGIQQYMPPMGMGIGMGMGMEMGMGMNRPVMPFTNMLASSTLPAATAAVHLGPRFPMPPFHMPHVAAPDSSRMQGANHPDNNMLNSLGTLDPDQSRIPNFTDPYQQYLGLQQAQLQLMQTMNQQNVSKPSSSRGQENPEKHQSGKVPL

SEQ ID NO: 312 - DNA, 1563 bp, Glycine max
atgaacaacagtgttcctgattggaattttgggagtgattcctgtgtcaccaccaccaatcaaaagaagcccatgataggggtggaccaagagcttgtagagcttcagtggcaaaatggccaggtagtgatgcacagccaaacacacagaaaaccgtttgtgaattccatcacgccgagaccgcttcggaggaattttcaatcaacattaaggactagtgagccatttgggaactcaagtaacttgattcaagatgatgagacagtctcatggatccaataccctcttgaggatccattggaacaagagttctgttcaaaccttttatctgaactggcaccttgtgaagttgagtcctataagcaaatcaagccatttgaagaggggaagtttaccaaattggatgcctctagtaccccccatgaattctcaggaattcctatacctgctccaagattccatgtttctgattcacctcagaaaaacaataatgacttgggtggatcatgtaaggtccaaaacttctctcacttttcagcacctcttaatgtttcttcagcatcggctaacgcgcattttagggacaaaattactggtaacatgtcaaaaaatgagattagagacaatcacatcccccaagatccagatgcaagcagggcatcaagcaatggtgtctggactactactttatccgccgagcctgaagctaatgaaaaagggaaatcggagatgcttgaaccaactacaacttcatcatccggtggctcaggtagtagtcttggaaaaaattgttcgctatctacgagaaaccagggccaaaaaagaaaaggaatagatgtggaagaatctgaggagcaaagtgaggacacagaacttaaatcagcacttggaaacaagtcatctcaacgtgcagggttggctcgaaggaaccgcgctgctgaagtgcataatctatctgaaaggagaaggagagaccggatcaatgagaagatgaaggcattgcaacaactcatacctcacagtagcaagacagacaaagcatcaatgttggaagaggcaatcgaatacttgaaatcacttcagttacaacttcagctaatgtggatgggatctggcatggcaccaattatgtttccaggaattcagcactatatgtcacaaatgggtatgggaatggctacaccgcctttccctcctattcacaatccgatgcaattaccgagactgccgcttgatcagtctgtatctgcgtctcagacaccaaaccagacattaatgagccaaaatcctattttgggtgcctttaattaccacaatcagatgcaaaatccagctctttcagagcaatatgcgcgttacatgggctatcatcttatgcaaaatgcctctcagccaatgaatgtattcagatatggtccccagggggtacggcatagtcaaacaatgattacacccagcaacagcagtggaaacatgagtggagcagcaaatattgatgaggctgtgagtggcaaaatggattatatcatcattataagtttcacattgcataacttctattga

SEQ ID NO: 313 - protein, 520 aa, Glycine max
MNNSVPDWNFGSDSCVTTTNQKKPMIGVDQELVELQWQNGQVVMHSQTHRKPFVNSITPRPLRRNFQSTLRTSEPFGNSSNLIQDDETVSWIQYPLEDPLEQEFCSNLLSELAPCEVESYKQIKPFEEGKFTKLDASSTPHEFSGIPIPAPRFHVSDSPQKNNNDLGGSCKVQNFSHFSAPLNVSSASANAHFRDKITGNMSKNEIRDNHIPQDPDASRASSNGVWTTTLSAEPEANEKGKSEMLEPTTTSSSGGSGSSLGKNCSLSTRNQGQKRKGIDVEESEEQSEDTELKSALGNKSSQRAGLARRNRAAEVHNLSERRRRDRINEKMKALQQLIPHSSKTDKASMLEEAIEYLKSLQLQLQLMWMGSGMAPIMFPGIQHYMSQMGMGMATPPFPPIHNPMQLPRLPLDQSVSASQTPNQTLMSQNPILGAFNYHNQMQNPALSEQYARYMGYHLMQNASQPMNVFRYGPQGVRHSQTMITPSNSSGNMSGAANIDEAVSGKMDYIIIISFTLHNFY

SEQ ID NO: 314 - DNA, 1386 bp, Medicago truncatula
atgaacaactactgcgtttcatatttccaatctcaaatggatcaacaacgattgcctcgtcctaagaaaccaatcattgcagatgatgagatcatggagttgttatggcaaaacggccaagttgttacacagaggccaaaccaccgtcatgccaagaaaccaccgtcatgtcaagaaacaactcgcggcggaggagcttctccagtagaaaactacaatcaatatctcttcatgcaagaaaacgaaatggcttcatggcttcattacgatgattctcccttcgatcgaaccttctccactgattacctcaatacgccgccggcgacggctaataacaacagtagcatacaaactccgacgtcggtggttccttctcgtcctccaattcccccgccacggaggatggggcacgtacagcctgagacaccgaatttcgcaaaacacggtgtaatgaacactgctgtgagggaatcaacggttgtggattcgtgtgatacaccagctgtgatgccggcggcgttttcggagacggtgaaaagcttggcggatcaaacggaaggagacaccgaagtagcggtggtttcgacaacttttgatgaaccgggaggttcaagtagcagtgaagaacctgaaccggttgggaaggtagcggagcaggaccgaaagaggaagggaatagaagcggaggaatgggaatatcagagcgaggatgttgattttgaatctgcggaagccaaaaaaaatatcagtggatcatctacaaagagatctcgtgctgctgaggtccataatctctcagagcggaggcgccgtgatcggattaatgaaaagatgaaagctctgcaagaacttatacctcgatctaataagtctgacaaagcatctatgctggatgaagcaattgattacttgaagtcgctgcagttacaagtgcagatgatgtccatgggatgtggcatggtacctatgatgtttcctggaatccagcagtatatgccaacggttggaatgggaatggggatgggtatggaaatgggaataaacagaccagtaatgccatttcccaatatgttatccggttctgctttgcctgcagccgcaaatttgggaccaaggttcgcgatgcctcctttccatatgccgcatgttccaacacctggttcatccagaatgcaagcagcaaatcaggtagataataatgtgatcacctcagctggaacacatgattcaaatcagtcacgtaccccaaacttcagtgattcttatcaacaatatcttggaccccaccagatgcagtttcaattgatgcagaatcaagcaatgaaccaaccaaatgtcagcaggcctcttgagaaaccagaaacccgccagtcaggagataagtga

SEQ ID NO: 315 - protein, 461 aa, Medicago truncatula
MNNYCVSYFQSQMDQQRLPRPKKPIIADDEIMELLWQNGQVVTQRPNHRHAKKPPSCQETTRGGGASPVENYNQYLFMQENEMASWLHYDDSPFDRTFSTDYLNTPPATANNNSSIQTPTSVVPSRPPIPPPRRMGHVQPETPNFAKHGVMNTAVRESTVVDSCDTPAVMPAAFSETVKSLADQTEGDTEVAVVSTTFDEPGGSSSSEEPEPVGKVAEQDRKRKGIEAEEWEYQSEDVDFESAEAKKNISGSSTKRSRAAEVHNLSERRRRDRINEKMKALQELIPRSNKSDKASMLDEAIDYLKSLQLQVQMMSMGCGMVPMMFPGIQQYMPTVGMGMGMGMEMGINRPVMPFPNMLSGSALPAAANLGPRFAMPPFHMPHVPTPGSSRMQAANQVDNNVITSAGTHDSNQSRTPNFSDSYQQYLGPHQMQFQLMQNQAMNQPNVSRPLEKPETRQSGDK

SEQ ID NO: 316 - DNA, 1455 bp, Medicago truncatula
atgaacaactactgcgtttcatatttccaatctcaaatggatcaacaacgattgcctcgtcctaagaaaccaatcattgcagatgatgagatcatggagttgttatggcaaaacggccaagttgttacacagaggccaaaccaccgtcatgccaagaaaccaccgtcatgtcaagaaacaactcgcggcggaggagcttctccagtagaaaactacaatcaatatctcttcatgcaagaaaacgaaatggcttcatggcttcattacgatgattctcccttcgatcgaaccttctccactgattacctcaatacgccgccggcgacggctaataacaacagtagcatacaaactccgacgtcggtggttccttctcgtcctccaattcccccgccacggaggatggggcacgtacagcctgagacaccgaatttcgcaaaacacggtgtaatgaacactgctgtgagggaatcaacggttgtggattcgtgtgatacaccagctgtgatgccggcggcgttttcggagacggtgaaaagcttggcggatcaaacggaaggagacaccgaagtagcggtggtttcgacaacttttgatgaaccgggaggttcaagtagcagtgaagaacctgaaccggttgggaaggtagcggagcaggaccgaaagaggaagggaatagaagcggaggaatgggaatatcagagcgaggatgttgattttgaatctgcggaagccaaaaaaaatatcagtggatcatctacaaagagatctcgtgctgctgaggtccataatctctcagagcggaggcgccgtgatcggattaatgaaaagatgaaagctctgcaagaacttatacctcgatctaataagtctgacaaagcatctatgctggatgaagcaattgattacttgaagtcgctgcagttacaagtgcagatgatgtccatgggatgtggcatggtacctatgatgtttcctggaatccagcagtatatgccaacggttggaatgggaatggggatgggtatggaaatgggaataaacagaccagtaatgccatttcccaatatgttatccggttctgctttgcctgcagccgcaaatttgggaccaaggttcgcgatgcctcctttccatatgccgcatgttccaacacctggttcatccagaatgcaagcagcaaatcaggtagataataatgtgatcacctcagctggaacacatgattcaaatcagtcacgtaccccaaacttcagtgattcttatcaacaatatcttggaccccaccagatgcagtttcaattgatgcagaatcaagcaatgaaccaaccaaatgtcagcaggcctcttgagaaaccagaaacccgccagtcaggtaaattgccttatcttagtattttgcaggatttggttatattttctgccactcctaatacagtatgccaagttttgtag

SEQ ID NO: 317 - protein, 484 aa, Medicago truncatula
MNNYCVSYFQSQMDQQRLPRPKKPIIADDEIMELLWQNGQVVTQRPNHRHAKKPPSCQETTRGGGASPVENYNQYLFMQENEMASWLHYDDSPFDRTFSTDYLNTPPATANNNSSIQTPTSVVPSRPPIPPPRRMGHVQPETPNFAKHGVMNTAVRESTVVDSCDTPAVMPAAFSETVKSLADQTEGDTEVAVVSTTFDEPGGSSSSEEPEPVGKVAEQDRKRKGIEAEEWEYQSEDVDFESAEAKKNISGSSTKRSRAAEVHNLSERRRRDRINEKMKALQELIPRSNKSDKASMLDEAIDYLKSLQLQVQMMSMGCGMVPMMFPGIQQYMPTVGMGMGMGMEMGINRPVMPFPNMLSGSALPAAANLGPRFAMPPFHMPHVPTPGSSRMQAANQVDNNVITSAGTHDSNQSRTPNFSDSYQQYLGPHQMQFQLMQNQAMNQPNVSRPLEKPETRQSGKLPYLSILQDLVIFSATPNTVCQVL

SEQ ID NO: 318 - DNA, 1485 bp, Oryza sativa
atgaaccagttcgtccctgattggagcaacatgggtgacgcatccaggacactcggcgaagatgacaacctcattgagctgctctggtgcaacggccatgtcgtcatgcagagccagaatcaccaccggaagctgccgccgaggccgccggagaaggcggcggcggcggcggtgcaagaagacgaggccggcctgtggttcccgttcgcgctcgccgactcgctggagaaggacatcttctcggacctcttctacgaggcgcccgtcgcggcgacggcggaggcggcgcctgctggcccgggcgcgggcgccgacggcgaaggaaagacttgcaagggcgacgcggcaatggcggaggaggagcgtggcgggccgggcgcggcgtccgaggcgccgcgcgagctgatgccgccgcccaagtcgacgaacgcgtcctgctcgaggcagcagacgatgagcctggcggacggcggcgacaacgccggggacctgtcggagctcgtccgggcgaggaggtcgtccggcggcgcggctcggcggaaggcggaggccggcggcggcggcggcggcgcgtcgtcgtcgatgctgagcgcgatcgggtcgagcatctgcgggagcaaccaggtgcaggtgcagcagcgcacggcgagcgagcccgggcgccgcggcgcgccgccctcggcggtggggagcgcgaacgccatcccctgcggcgggcgcgaccacggccacggccacgaggcgaccaccgtggcgtcgtcgtcggggcggtccaactgctgcttcggcaccaccaccaccacggagccgacgagcaccagcaaccggagcagcaagcgcaagcggctcgacaccaccgaggactccgagagccccagcgaggacgcggagtcggagtcggcggcgctggcgcgcaagccgccggcgaagatgacgacggcgcggaggagccgcgccgccgaggtgcacaacctctccgagaggaggagacgggacaggatcaacgagaagatgagagccctgcaggagctcataccacactgcaacaagactgacaaggcgtcgatgctggacgaggcgatcgagtacctcaagtctctgcagctgcagctgcagatgatgtggatggggagcgggatggcgccgccggtgatgttcccgggggtgcaccagtatctgccgaggatgggcgtcgggatgggggcggcggcggcggcgatgccgaggatgccgttcatggcggcgccgcagccggtggtgcccacaccgccggtgaaccaccttgacctgggcgtcaaccacctgcagccgccgccgacccagggagtggggtattatccgttgggggccaaggccgtgcagcagcagcaaaatccaccacttcacgtgccaaatggaagcattatgcctcctcctgaaaatgcacccaacacaggatcaggtatgggatccttctacttctacttctacttctcttccgattaa

SEQ ID NO: 319 - protein, 494 aa, Oryza sativa
MNQFVPDWSNMGDASRTLGEDDNLIELLWCNGHVVMQSQNHHRKLPPRPPEKAAAAAVQEDEAGLWFPFALADSLEKDIFSDLFYEAPVAATAEAAPAGPGAGADGEGKTCKGDAAMAEEERGGPGAASEAPRELMPPPKSTNASCSRQQTMSLADGGDNAGDLSELVRARRSSGGAARRKAEAGGGGGGASSSMLSAIGSSICGSNQVQVQQRTASEPGRRGAPPSAVGSANAIPCGGRDHGHGHEATTVASSSGRSNCCFGTTTTTEPTSTSNRSSKRKRLDTTEDSESPSEDAESESAALARKPPAKMTTARRSRAAEVHNLSERRRRDRINEKMRALQELIPHCNKTDKASMLDEAIEYLKSLQLQLQMMWMGSGMAPPVMFPGVHQYLPRMGVGMGAAAAAMPRMPFMAAPQPVVPTPPVNHLDLGVNHLQPPPTQGVGYYPLGAKAVQQQQNPPLHVPNGSIMPPPENAPNTGSGMGSFYFYFYFSSD

SEQ ID NO: 320 - DNA, 1266 bp, Oryza sativa
atggatggcaatgcgagatcggcggcgaatcagacgaagcaaatcgtcacggacaacgagctggtggagctgctatggcacaacggcggcgtcgtggcgcagccgcaggcggcgcaggcgagggtcgtctcctcctccggccgcggccagagcgccagcgtgctcaccggcgacgacacggagaccgccgcgtggttcccggacaccctcgacgacgcgctggagaaggacctctacacgcagctctggcgcagcgtcaccggcgacgcgttcccggcggccgcggcggcggggccgagctctcaccacgctccgccgccggacttgccgcccccggcggcgaggccgccgatgaggagcggcatcgggtcgagctggaccggcgacatctgttcggccttctgcggcagcaaccacatcccggagacggcggcgcagcgctgccgggacgccggcgcggcattgccgccggagcggccgcgccggtcgagcacccacgacggcgccggcacgtcgtcgtcgggcggctccggcagcaacttcggcgcttccggcttgcccagcgagagcgccagtgcccacaagaggaaaggcagagaagattcagacagtcgcagtgaggatgctgaatgcgaggcaaccgaagagaccaaatcgtcgtcgcggcgatatggatcaaagaggagaactcgtgcagctgaagttcataacctgtcagagaggagaagaagggatcggatcaacgagaagatgcgcgcattgcaagaactcatacctcattgcaacaagaccgacaaggcatctatattagatgaagcaatcgagtatctgaagtcactccaaatgcaagttcagatcatgtggatgactactgggatggcaccaatgatgttccctggtgctcaccagttcatgccaccaatggccgtgggcatgaattctgcgtgcatgcctgcggcacaaggcctaagtcacatgtcaagattgccatacatgaaccattctatgccaaatcacatccctctaaattcatctccagctatgaacccaatgaatgttgcaaaccagatgcagaacattcaactgagagaggcaagcaatcccttccttcacccagatggctggcaaacagtgccaccacaggtatcaggaccatatgcttctgggcctcaagtagcacagcaaaaccagataccgaaagcgtcagctagcactgttctgccaaattctggggctgaacaaccaccaacctctgatggaatttag

SEQ ID NO: 321 - protein, 421 aa, Oryza sativa
MDGNARSAANQTKQIVTDNELVELLWHNGGVVAQPQAAQARVVSSSGRGQSASVLTGDDTETAAWFPDTLDDALEKDLYTQLWRSVTGDAFPAAAAAGPSSHHAPPPDLPPPAARPPMRSGIGSSWTGDICSAFCGSNHIPETAAQRCRDAGAALPPERPRRSSTHDGAGTSSSGGSGSNFGASGLPSESASAHKRKGREDSDSRSEDAECEATEETKSSSRRYGSKRRTRAAEVHNLSERRRRDRINEKMRALQELIPHCNKTDKASILDEAIEYLKSLQMQVQIMWMTTGMAPMMFPGAHQFMPPMAVGMNSACMPAAQGLSHMSRLPYMNHSMPNHIPLNSSPAMNPMNVANQMQNIQLREASNPFLHPDGWQTVPPQVSGPYASGPQVAQQNQIPKASASTVLPNSGAEQPPTSDGI

SEQ ID NO: 322 - DNA, 828 bp, Oryza sativa
atggcgatttgcagcacggacaacgagctggtggagctgctatggcacaacggcggcgtcgtggcgcagccgcaggcggcgcaggcgagggtcgtctcctcctccggccgcggccagagcgccagcgtgctcaccggcgacgacacggagaccgccgcgtggttcccggacaccctcgacgacgcgctggagaaggacctctacacgcagctctggcgcagcgtcaccggcgacgcgttcccggcggccgcggcggcggggccgagctctcaccacgctccgccgccggacttgccgcccccggcggcgaggccgccgatgaggagcggcatcgggtcgagctggaccggcgacatctgttcggccttctgcggcagcaaccacatcccggagacggcggcgcagcgctgccgggacgccggcgcggcattgccgccggagcggccgcgccggtcgagcacccacgacggcgccggcacgtcgtcgtcgggcggctccggcagcaacttcggcgcttccggcttgcccagcgagagcgccagtgcccacaagaggaaaggcagagaagattcagacagtcgcagtgaggatgctgaatgcgaggcaaccgaagagaccaaatcgtcgtcgcggcgatatggatcaaagaggagaactcgtgcagctgaagttcataacctgtcagagaggagaagaagggatcggatcaacgagaagatgcgcgcattgcaagaactcatacctcattgcaacaagaccgacaaggcatctatattagatgaagcaatcgagtatctgaagtcactccaaatgcaagttcaggtttga

SEQ ID NO: 323 - protein, 275 aa, Oryza sativa
MAICSTDNELVELLWHNGGVVAQPQAAQARVVSSSGRGQSASVLTGDDTETAAWFPDTLDDALEKDLYTQLWRSVTGDAFPAAAAAGPSSHHAPPPDLPPPAARPPMRSGIGSSWTGDICSAFCGSNHIPETAAQRCRDAGAALPPERPRRSSTHDGAGTSSSGGSGSNFGASGLPSESASAHKRKGREDSDSRSEDAECEATEETKSSSRRYGSKRRTRAAEVHNLSERRRRDRINEKMRALQELIPHCNKTDKASILDEAIEYLKSLQMQVQV

SEQ ID NO: 324 - DNA, 861 bp, Oryza sativa
atggatggcaatgcgagatcggcggcgaatcagacgaagcaaatcgtcacggacaacgagctggtggagctgctatggcacaacggcggcgtcgtggcgcagccgcaggcggcgcaggcgagggtcgtctcctcctccggccgcggccagagcgccagcgtgctcaccggcgacgacacggagaccgccgcgtggttcccggacaccctcgacgacgcgctggagaaggacctctacacgcagctctggcgcagcgtcaccggcgacgcgttcccggcggccgcggcggcggggccgagctctcaccacgctccgccgccggacttgccgcccccggcggcgaggccgccgatgaggagcggcatcgggtcgagctggaccggcgacatctgttcggccttctgcggcagcaaccacatcccggagacggcggcgcagcgctgccgggacgccggcgcggcattgccgccggagcggccgcgccggtcgagcacccacgacggcgccggcacgtcgtcgtcgggcggctccggcagcaacttcggcgcttccggcttgcccagcgagagcgccagtgcccacaagaggaaaggcagagaagattcagacagtcgcagtgaggatgctgaatgcgaggcaaccgaagagaccaaatcgtcgtcgcggcgatatggatcaaagaggagaactcgtgcagctgaagttcataacctgtcagagaggagaagaagggatcggatcaacgagaagatgcgcgcattgcaagaactcatacctcattgcaacaagaccgacaaggcatctatattagatgaagcaatcgagtatctgaagtcactccaaatgcaagttcaggtttga

SEQ ID NO: 325 - protein, 286 aa, Oryza sativa
MDGNARSAANQTKQIVTDNELVELLWHNGGVVAQPQAAQARVVSSSGRGQSASVLTGDDTETAAWFPDTLDDALEKDLYTQLWRSVTGDAFPAAAAAGPSSHHAPPPDLPPPAARPPMRSGIGSSWTGDICSAFCGSNHIPETAAQRCRDAGAALPPERPRRSSTHDGAGTSSSGGSGSNFGASGLPSESASAHKRKGREDSDSRSEDAECEATEETKSSSRRYGSKRRTRAAEVHNLSERRRRDRINEKMRALQELIPHCNKTDKASILDEAIEYLKSLQMQVQV

SEQ ID NO: 326 - DNA, 1170 bp, Oryza sativa
atggatggcaatgcgagatcggcggcgaatcagacgaagcaaatcgtcacggacaacgagctggtggagctgctatggcacaacggcggcgtcgtggcgcagccgcaggcggcgcaggcgagggtcgtctcctcctccggccgcggccagagcgccagcgtgctcaccggcgacgacacggagaccgccgcgtggttcccggacaccctcgacgacgcgctggagaaggacctctacacgcagctctggcgcagcgtcaccggcgacgcgttcccggcggccgcggcggcggggccgagctctcaccacgctccgccgccggacttgccgcccccggcggcgaggccgccgatgaggagcggcatcgggtcgagctggaccggcgacatctgttcggccttctgcggcagcaaccacatcccggagacggcggcgcagcgctgccgggacgccggcgcggcattgccgccggagcggccgcgccggtcgagcacccacgacggcgccggcacgtcgtcgtcgggcggctccggcagcaacttcggcgcttccggcttgcccagcgagagcgccagtgcccacaagaggaaaggcagagaagattcagacagtcgcagtgaggatgctgaatgcgaggcaaccgaagagaccaaatcgtcgtcgcggcgatatggatcaaagaggagaactcgtgcagctgaagttcataacctgtcagagaggagaagaagggatcggatcaacgagaagatgcgcgcattgcaagaactcatacctcattgcaacaagaccgacaaggcatctatattagatgaagcaatcgagtatctgaagtcactccaaatgcaagttcagatcatgtggatgactactgggatggcaccaatgatgttccctggtgctcaccagttcatgccaccaatggccgtgggcatgaattctgcgtgcatgcctgcggcacaaggcctaagtcacatgtcaagattgccatacatgaaccattctatgccaaatcacatccctctaaattcatctccagctatgaacccaatgaatgttgcaaaccagatgcagaacattcaactgagagaggcaagcaatcccttccttcacccagatggctggcaaacagtgccaccacaggaccatatgcttctgggcctcaagtag

SEQ ID NO: 327 - protein, 389 aa, Oryza sativa
MDGNARSAANQTKQIVTDNELVELLWHNGGVVAQPQAAQARVVSSSGRGQSASVLTGDDTETAAWFPDTLDDALEKDLYTQLWRSVTGDAFPAAAAAGPSSHHAPPPDLPPPAARPPMRSGIGSSWTGDICSAFCGSNHIPETAAQRCRDAGAALPPERPRRSSTHDGAGTSSSGGSGSNFGASGLPSESASAHKRKGREDSDSRSEDAECEATEETKSSSRRYGSKRRTRAAEVHNLSERRRRDRINEKMRALQELIPHCNKTDKASILDEAIEYLKSLQMQVQIMWMTTGMAPMMFPGAHQFMPPMAVGMNSACMPAAQGLSHMSRLPYMNHSMPNHIPLNSSPAMNPMNVANQMQNIQLREASNPFLHPDGWQTVPPQDHMLLGLK

SEQ ID NO: 328 - DNA, 1257 bp, Oryza sativa
atggatgcgggtgcaactgcaaggtcgtcgtcgtcgtcggcgatgatgatgaaccagaagaagcccttgctctcggatggcgagctggtggagctcctgtggcaggacgggggcgtcgtcgcgcacgcgcagacgcgccaccgatcgtccgacgtcctcgcccggagcggcgtcaccggcgaggaggagacggcgtccgcgtggttcgcggatggcggtggcggcggcggcggcgacgacgacgcgctgggcctgggcatgggcagggacatctactcgcagctctggcacagcttcgccaatgtcgacgggcacgcggcgggcgcgctcgcgctcgcgacgccgacgccgacgccgcgggcggcggcgaggagcgacgacgtgtcgagccgtctcgacgaggccgacctgagcatctgcggcagcaacgcggtcgtggcgccggcgctgcccgcggacgacgacgacgacatcgacgccgccgcgccgcgcgaggaggaggaggaggaggaggaggggccgggcgccgcgcgcgccgccggcgcgtcgtcgtcgggcgggtcggggagcgggagcgggagctacccgctgttcaagcgggggagggaggagctggttgacagccttagcgaggtcgccgacgagacccggccgtcgaagcggccggcggcgaagcgccggactcgcgccgccgaggtccacaacctgtcagagcgtagaagaagggataggatcaatgagaagttgagagcattgcaagaactggtacctcattgcaacaagactgacaaagcatccatactagatgaagcaattgagtacttgaagtccctgcaaatgcaagttcagatcatgtggatgactaccgggattgtgccgatgatgttccccggtacccaccagctcatgccaccgatgggcatgggattgaacacggcatgcatgcctggggctcaagctcaaggcctgaatcagatgcaaagaacaacatattacatgaacaattctctgccaaaccagatgcctcagatcccttctccagctatgaatgcacccagtgttccagacgatatgcagaatgataatcgcatccgcgggccaagaaatccttttcttcattgcaatgatacactgacagcaacagctcaggtgccaggtttgtttacctatggatctcaaattgcagaacaaaatgagattcaggagttactctctggcgctgtcattccatcctcatctgatgggaccataaaataa

SEQ ID NO: 329 - protein, 418 aa, Oryza sativa
MDAGATARSSSSSAMMMNQKKPLLSDGELVELLWQDGGVVAHAQTRHRSSDVLARSGVTGEEETASAWFADGGGGGGGDDDALGLGMGRDIYSQLWHSFANVDGHAAGALALATPTPTPRAAARSDDVSSRLDEADLSICGSNAVVAPALPADDDDDIDAAAPREEEEEEEEGPGAARAAGASSSGGSGSGSGSYPLFKRGREELVDSLSEVADETRPSKRPAAKRRTRAAEVHNLSERRRRDRINEKLRALQELVPHCNKTDKASILDEAIEYLKSLQMQVQIMWMTTGIVPMMFPGTHQLMPPMGMGLNTACMPGAQAQGLNQMQRTTYYMNNSLPNQMPQIPSPAMNAPSVPDDMQNDNRIRGPRNPFLHCNDTLTATAQVPGLFTYGSQIAEQNEIQELLSGAVIPSSSDGTIK

SEQ ID NO: 330 - DNA, 1575 bp, Arabidopsis thaliana
atgcctctgtttgagcttttcaggctcaccaaagctaagcttgaatctgctcaagacaggaacccttctccacctgtagatgaagttgtggagctggtgtgggaaaatggtcagatatcaactcaaagtcagtcaagtagatcgaggaacattcctccaccacaagcaaactcttctagagctagagagattggaaatggctcaaagacgactatggtggacgagatccctatgtcagtgccatcactaatgacgggtttgagtcaagacgatgactttgttccatggttgaatcatcatccctcccttgatggatattgctctgatttcttgcgtgatgtgtcgtctcctgttactgtcaacgagcaagagagtgatatggcggtaaaccaaactgctttcccgttgtttcagagaagaaaggatggcaatgaatcagctcctgctgcttcttcgtcgcagtataacggtttccaatcgcattctctgtatggaagtgatagagctagagatcttcctagccaacaaaccaatccggatcggtttactcagacgcaggaaccactaattactagtaacaagcctagtttggtcaacttttcacatttcttacgccctgcaacttttgcgaagactactaataataaccttcatgacactaaagaaaagagtcctcaaagcccgccaaatgtgtttcagaccagagttcttggagctaaagactctgaagataaggttcttaacgagtctgttgcttctgctacgcctaaagataaccaaaaggcttgcctaatatcagaggactcatgtagaaaagaccaagagagtgaaaaagcagttgtatgttcttctgttggctcgggtaatagtctcgatggcccatccgaaagtccttcactttctttaaagagaaagcattcgaatattcaagacattgactgtcatagtgaagatgtggaagaagaatcaggagatggaagaaaggaagcaggtccatctcgaacgggtttgggttcaaagagaagccgctctgcagaagtgcataatctgtctgaaaggagacggcgtgataggatcaacgagaagatgcgtgccctgcaagaactcattccaaactgtaacaaggtggacaaagcttcgatgctagatgaagccatcgagtatctcaagtcactccaacttcaagtgcagatcatgtcaatggcgtctggttactatctgccaccggcggttatgttcccaccgggtatggggcattacccggcagcagctgctgcaatggcaatgggtatgggaatgccttatgcaatgggcttgcctgatttgagccgtggtggttcatcggttaaccacggaccacagttccaagtctcggggatgcaacaacaaccagtggcgatgggtattccacgtgtctctggtggtggtatctttgccggttcttcgacgattggcaatggctcgactagagatttatctggttctaaagatcaaacaacgacgaataacaacagtaacttgaaaccaataaagagaaaacaggggtcttctgatcagttttgtggatcgtcgtga

SEQ ID NO: 331 - protein, 524 aa, Oryza sativa
MPLFELFRLTKAKLESAQDRNPSPPVDEVVELVWENGQISTQSQSSRSRNIPPPQANSSRAREIGNGSKTTMVDEIPMSVPSLMTGLSQDDDFVPWLNHHPSLDGYCSDFLRDVSSPVTVNEQESDMAVNQTAFPLFQRRKDGNESAPAASSSQYNGFQSHSLYGSDRARDLPSQQTNPDRFTQTQEPLITSNKPSLVNFSHFLRPATFAKTTNNNLHDTKEKSPQSPPNVFQTRVLGAKDSEDKVLNESVASATPKDNQKACLISEDSCRKDQESEKAVVCSSVGSGNSLDGPSESPSLSLKRKHSNIQDIDCHSEDVEEESGDGRKEAGPSRTGLGSKRSRSAEVHNLSERRRRDRINEKMRALQELIPNCNKVDKASMLDEAIEYLKSLQLQVQIMSMASGYYLPPAVMFPPGMGHYPAAAAAMAMGMGMPYAMGLPDLSRGGSSVNHGPQFQVSGMQQQPVAMGIPRVSGGGIFAGSSTIGNGSTRDLSGSKDQTTTNNNSNLKPIKRKQGSSDQFCGSS

SEQ ID NO: 332 - DNA, 1233 bp, Oryza sativa
atggcgatttgcagcacggacaacgagctggtggagctgctatggcacaacggcggcgtcgtggcgcagccgcaggcggcgcaggcgagggtcgtctcctcctccggccgcggccagagcgccagcgtgctcaccggcgacgacacggagaccgccgcgtggttcccggacaccctcgacgacgcgctggagaaggacctctacacgcagctctggcgcagcgtcaccggcgacgcgttcccggcggccgcggcggcggggccgagctctcaccacgctccgccgccggacttgccgcccccggcggcgaggccgccgatgaggagcggcatcgggtcgagctggaccggcgacatctgttcggccttctgcggcagcaaccacatcccggagacggcggcgcagcgctgccgggacgccggcgcggcattgccgccggagcggccgcgccggtcgagcacccacgacggcgccggcacgtcgtcgtcgggcggctccggcagcaacttcggcgcttccggcttgcccagcgagagcgccagtgcccacaagaggaaaggcagagaagattcagacagtcgcagtgaggatgctgaatgcgaggcaaccgaagagaccaaatcgtcgtcgcggcgatatggatcaaagaggagaactcgtgcagctgaagttcataacctgtcagagaggagaagaagggatcggatcaacgagaagatgcgcgcattgcaagaactcatacctcattgcaacaagaccgacaaggcatctatattagatgaagcaatcgagtatctgaagtcactccaaatgcaagttcagatcatgtggatgactactgggatggcaccaatgatgttccctggtgctcaccagttcatgccaccaatggccgtgggcatgaattctgcgtgcatgcctgcggcacaaggcctaagtcacatgtcaagattgccatacatgaaccattctatgccaaatcacatccctctaaattcatctccagctatgaacccaatgaatgttgcaaaccagatgcagaacattcaactgagagaggcaagcaatcccttccttcacccagatggctggcaaacagtgccaccacaggtatcaggaccatatgcttctgggcctcaagtagcacagcaaaaccagataccgaaagcgtcagctagcactgttctgccaaattctggggctgaacaaccaccaacctctgatggaatttag

SEQ ID NO: 333 - protein, 410 aa, Oryza sativa
MAICSTDNELVELLWHNGGVVAQPQAAQARVVSSSGRGQSASVLTGDDTETAAWFPDTLDDALEKDLYTQLWRSVTGDAFPAAAAAGPSSHHAPPPDLPPPAARPPMRSGIGSSWTGDICSAFCGSNHIPETAAQRCRDAGAALPPERPRRSSTHDGAGTSSSGGSGSNFGASGLPSESASAHKRKGREDSDSRSEDAECEATEETKSSSRRYGSKRRTRAAEVHNLSERRRRDRINEKMRALQELIPHCNKTDKASILDEAIEYLKSLQMQVQIMWMTTGMAPMMFPGAHQFMPPMAVGMNSACMPAAQGLSHMSRLPYMNHSMPNHIPLNSSPAMNPMNVANQMQNIQLREASNPFLHPDGWQTVPPQVSGPYASGPQVAQQNQIPKASASTVLPNSGAEQPPTSDGI

SEQ ID NO: 334 - DNA, 1344 bp, Oryza sativa
atggatgcgggtgcaactgcaaggtcgtcgtcgtcgtcggcgatgatgatgaaccagaagaagcccttgctctcggatggcgagctggtggagctcctgtggcaggacgggggcgtcgtcgcgcacgcgcagacgcgccaccgatcgtccgacgtcctcgcccggagcggcgtcaccggcgaggaggagacggcgtccgcgtggttcgcggatggcggtggcggcggcggcggcgacgacgacgcgctgggcctgggcatgggcagggacatctactcgcagctctggcacagcttcgccaatgtcgacgggcacgcggcgggcgcgctcgcgctcgcgacgccgacgccgacgccgcgggcggcggcgaggagcgacgacgtgtcgagccgtctcgacgaggccgacctgagcatctgcggcagcaacgcggtcgtggcgccggcgctgcccgcggacgacgacgacgacatcgacgccgccgcgccgcgcgaggaggaggaggaggaggaggaggggccgggcgccgcgcgcgccgccggcgcgtcgtcgtcgggcgggtcggggagcgggagcgggagctacccgctgttcaagcgggggagggaggagctggttgacagccttagcgaggtcgccgacgagacccggccgtcgaagcggccggcggcgaagcgccggactcgcgccgccgaggtccacaacctgtcagagcgtagaagaagggataggatcaatgagaagttgagagcattgcaagaactggtacctcattgcaacaagactgacaaagcatccatactagatgaagcaattgagtacttgaagtccctgcaaatgcaagttcagatcatgtggatgactaccgggattgtgccgatgatgttccccggtacccaccagctcatgccaccgatgggcatgggattgaacacggcatgcatgcctggggctcaagctcaaggcctgaatcagatgcaaagaacaacatattacatgaacaattctctgccaaaccagatgcctcagatcccttctccagctatgaatgcacccagtgttccagacgatatgcagaatgataatcgcatccgcgggccaagaaatccttttcttcattgcaatgatacactgacagcaacagctcaggttgattattatgttaaatttcatcattaccgatcattcagacttcaattcttgtttatcttacaatatcagttcttttcaggtgccaggcaccggcaatatgtgaagaatatagtggctgtgtggactcagcttgagccggcatcgcaaaagctgcacaagaacacaacagtgacagtttcactcttcttttag

SEQ ID NO: 335 - protein, 447 aa, Oryza sativa
MDAGATARSSSSSAMMMNQKKPLLSDGELVELLWQDGGVVAHAQTRHRSSDVLARSGVTGEEETASAWFADGGGGGGGDDDALGLGMGRDIYSQLWHSFANVDGHAAGALALATPTPTPRAAARSDDVSSRLDEADLSICGSNAVVAPALPADDDDDIDAAAPREEEEEEEEGPGAARAAGASSSGGSGSGSGSYPLFKRGREELVDSLSEVADETRPSKRPAAKRRTRAAEVHNLSERRRRDRINEKLRALQELVPHCNKTDKASILDEAIEYLKSLQMQVQIMWMTTGIVPMMFPGTHQLMPPMGMGLNTACMPGAQAQGLNQMQRTTYYMNNSLPNQMPQIPSPAMNAPSVPDDMQNDNRIRGPRNPFLHCNDTLTATAQVDYYVKFHHYRSFRLQFLFILQYQFFSGARHRQYVKNIVAVWTQLEPASQKLHKNTTVTVSLFF

SEQ ID NO: 336 - DNA, 2202 bp, Populus trichocarpa
atggctaaaggaaagattgatttttctcaagagaaggatcctagttgttcaactgatctgtcttttgtcagacctgagaatgactttggtgagctaatatgggaaaatggtcagattcaatccagtagagctagaaagatacaaccttgtagcaccttaccatgtcaaaaccccaagattcgatataaagacataggaaatggcaccgatattagaacaggaaagtttgggatgatggagtctacactgaatgaactcccgatgtcagttcccgctgttgaaatgggggtgaatcaagatgatgacatggtgccttggttgaattatccattggatgaatctcctcaacatgattattgttctgaatttttgcccgagttatctggtgttactgtaaatggacactcctcccagagtaattttccgtcgtttggtaaaaaaagttttagccagtcagttagggactcccgtactgtttctgtacataatggtttgagtttagagcaaggagatgtggcgaagaattcttcagcaggggatactgaagctaataggcctagaactagtgctagccagttatatctatcatcttctgagcattgccaaacatcatttccatattttagatccagagtttcagctaaaaatggtgatagtacaagcaatgctgcccaccatgtcgtttcagtggattctattcgagctccaacatcaggaggtggttttcccagcataaagatgcagaagcaagttccagcacaatccacaaccaactccagtttgatgaatttctctcattttgcaagacctgctgctcttgcgaaagctaatcttcagaacattggcatgagagctggtacagggatttcaaacatggaaagaacgcaaaataaagataagggctcaattgcaagtagtagcaatccggctgaatgcactcccattaattcatgtagtggtttgctaaaggaaacgagctcccattgtcttcctgttctgatgccacccaaggttgacgctaaaccatcagaggctaagcctgcagaaggatttgttcctgctgagctacctgaggctacaattccagaaggtgactcaaaaagtgatagaaactgtcgtcaaaacttttgtgaaagtgcaattaaaggagtagcagatgttgagaagactaaagagcccgtggttgcttcttcttctgttggctcggacaatagtgtggagagagcttcggatgatccaactgagaatctgaagagaaaacatcgagatactgaggagtctgaaggtcctagtgaagatgtagaagaagaatctgtaggtgcaaaaaaacaagctcctgctcgagcaggtaatggctccaagagaaaccgggctgcagaagttcataatttatctgaaaggaggcgaagggataggatcaacgaaaagatgcgggccctacaagaactcataccaaactgtaacaaggtggataaagcttcaatgcttgatgaggccattgagtatttaaagacgcttcagcttcaagtacagatcatgtcaatgggagctggattgtatatgccatcaatgatgttaccccctggaatgcctcacatgcatgcagctcatatggggcagttcttacccatgggtgtgggaatgggaatgcgtatgggaatgggaatgggttttgggatgagtatgccagacgtgaatggtggatcttctggttgccctatgtatcaagtgcctcctatgcatggaccgcatttctctggccagccaatgtcagggctaagtgctttgcataggatgggaggatcgaatcttcagatgtttggcctttcaggtcaaggatttccaatgtcatttccctgtgcacccttagtgccaatgtctggagggcctcctctgaaaacaaacatggaaccaaatgcttgtggtgtggtaggtgctacggataatttggattcagctacggcctgtagttcacatgaagcaattcagaaaatcaactcgcaagtgatgcagaataatgttgtcaatagctcaatgaatcagacctctagtcagtgccaggcaacaaatgaatgctttgaacaacctgctttggtgcaaaataatgctcaagactcaggagttgctgacaacagagcattgaagtcggttggtggaaatgacaatgtaccaagtagtgaggctggtgagcatttgcaataa

SEQ ID NO: 337 - protein, 733 aa, Populus trichocarpa
MAKGKIDFSQEKDPSCSTDLSFVRPENDFGELIWENGQIQSSRARKIQPCSTLPCQNPKIRYKDIGNGTDIRTGKFGMMESTLNELPMSVPAVEMGVNQDDDMVPWLNYPLDESPQHDYCSEFLPELSGVTVNGHSSQSNFPSFGKKSFSQSVRDSRTVSVHNGLSLEQGDVAKNSSAGDTEANRPRTSASQLYLSSSEHCQTSFPYFRSRVSAKNGDSTSNAAHHVVSVDSIRAPTSGGGFPSIKMQKQVPAQSTTNSSLMNFSHFARPAALAKANLQNIGMRAGTGISNMERTQNKDKGSIASSSNPAECTPINSCSGLLKETSSHCLPVLMPPKVDAKPSEAKPAEGFVPAELPEATIPEGDSKSDRNCRQNFCESAIKGVADVEKTKEPVVASSSVGSDNSVERASDDPTENLKRKHRDTEESEGPSEDVEEESVGAKKQAPARAGNGSKRNRAAEVHNLSERRRRDRINEKMRALQELIPNCNKVDKASMLDEAIEYLKTLQLQVQIMSMGAGLYMPSMMLPPGMPHMHAAHMGQFLPMGVGMGMRMGMGMGFGMSMPDVNGGSSGCPMYQVPPMHGPHFSGQPMSGLSALHRMGGSNLQMFGLSGQGFPMSFPCAPLVPMSGGPPLKTNMEPNACGVVGATDNLDSATACSSHEAIQKINSQVMQNNVVNSSMNQTSSQCQATNECFEQPALVQNNAQDSGVADNRALKSVGGNDNVPSSEAGEHLQ

SEQ ID NO: 338 - DNA, 1848 bp, Populus trichocarpa
atgaatccttatgttcctgattttgaaatggacgatgattactctctcccacctcctccttcaacccatactcgccccagaaaaccagccatgcaggaagaagagatcatggagctactatggcagaacggccaagtagtgatgcatagtcaaagatctcaaaagaaatcatctcctccaccgtccgagttggatgatgcggtgctcccagctgatcaattacctggtactaaagagatccgatcatcacatgatcaacaacaagaacatcaccatctttttatgcaagaagatgagatggcttcttggcttaatcatcctctaaacgacaccaatttcgaccatgatttctgcgccgatttgctatatcctccgacagcttccaccgcttccatcaccagggaagctgctgtcaccaacgccgctgcgtctactgttcgaggtgcgactcagagaatggaagctaggagttatccggcggtatcggcgccgaggccgccgataccgccggtgaggagagcggaggtggtgcagaacttcgcgtacttctcgaggcaccgagcgggaggagtttcggaatctggacggtctaattcgaagagcgtggtgagggaatcgacggttgttgactcgtgtgagactccaacagcgagaatttcggagacggcgtttgctagaagtgcggataacacgtgtgggaccattaacggcgctgctgtagcaggcacggtttctagtgctccctcaagtaatagagagacgatgacgaatccttgtgagatgacctccacgtcatcacctggttgctcgagtgctagcgctgagctgccggctctgatgtctccagtggaagaccggaagcggaagggaagagaagaggaagctgagtgtcatagcgagtttattgcaataagcattacaatggcacatggtaatcaacctcagtcagtagcaatcaggcagaaaacccaaaacagtgcagacagctcgaaacctcttcagggtagaagagatgccgcaaatccactaaaggatgctgagtttgaatctgctgatgcaaagaaacgaattcgtggatcaatgtcttcgaagagatctcgtgcagcagaagttcacaacctatcagaaaggagacgccgagatcggatcaatgaaaagatgagggctttgcaagagctcatacctcgttgcaacaagtcggacaaagcttctatgttagatgaggcaattgagtacctgaaatcgcttcagttgcaagtacagatgatgtctatgggatgcagcatggtccccatgatgtttcctggcttccagcagtacatgccgccaatggggatagggatgggcatgggcatggaaatgggattgagtcggccaatgatgccatttcccaatattttggcgggtgcaccctcagcaacaccagctgcagcagctcatttggtccctaggttccctgtgccgccctttcatgtgccccccatccctgctcctgatccatccagagtccaaccaaccaaccaggtagatcctatgctaggctcaccaggtcaacagaatccaaaccaaccacgagtcccaaattttgttgatccatatcagcactatcttggcctctaccagatgcatttaccaggagtaccacggaaccaagctatggctcagccaagtaccagcaagccaagtactagtcgagtagctgagaatcctggcaatcaccagtcaggttgtgatggggaaaaaatggctcatgcttttccttcaagtcaggctaaaaaacaggagtggaaaatggggaaaggaataaatggagttatgctacgtgggtgtccacctctatctcaatag

SEQ ID NO: 339 - protein, 615 aa, Populus trichocarpa
MNPYVPDFEMDDDYSLPPPPSTHTRPRKPAMQEEEIMELLWQNGQVVMHSQRSQKKSSPPPSELDDAVLPADQLPGTKEIRSSHDQQQEHHHLFMQEDEMASWLNHPLNDTNFDHDFCADLLYPPTASTASITREAAVTNAAASTVRGATQRMEARSYPAVSAPRPPIPPVRRAEVVQNFAYFSRHRAGGVSESGRSNSKSVVRESTVVDSCETPTARISETAFARSADNTCGTINGAAVAGTVSSAPSSNRETMTNPCEMTSTSSPGCSSASAELPALMSPVEDRKRKGREEEAECHSEFIAISITMAHGNQPQSVAIRQKTQNSADSSKPLQGRRDAANPLKDAEFESADAKKRIRGSMSSKRSRAAEVHNLSERRRRDRINEKMRALQELIPRCNKSDKASMLDEAIEYLKSLQLQVQMMSMGCSMVPMMFPGFQQYMPPMGIGMGMGMEMGLSRPMMPFPNILAGAPSATPAAAAHLVPRFPVPPFHVPPIPAPDPSRVQPTNQVDPMLGSPGQQNPNQPRVPNFVDPYQHYLGLYQMHLPGVPRNQAMAQPSTSKPSTSRVAENPGNHQSGCDGEKMAHAFPSSQAKKQEWKMGKGINGVMLRGCPPLSQ

SEQ ID NO: 340 - DNA, 2229 bp, Populus trichocarpa
atgcctttgtctgagctattatatcgaatggctaaaggaaagattgatttttctcaagagaaggatcctagttgttcaactgatctgtcttttgtcagacctgagaatgactttggtgagctaatatgggaaaatggtcagattcaatccagtagagctagaaagatacaaccttgtagcaccttaccatgtcaaaaccccaagattcgatataaagacataggaaatggcaccgatattagaacaggaaagtttgggatgatggagtctacactgaatgaactcccgatgtcagttcccgctgttgaaatgggggtgaatcaagatgatgacatggtgccttggttgaattatccattggatgaatctcctcaacatgattattgttctgaatttttgcccgagttatctggtgttactgtaaatggacactcctcccagagtaattttccgtcgtttggtaaaaaaagttttagccagtcagttagggactcccgtactgtttctgtacataatggtttgagtttagagcaaggagatgtggcgaagaattcttcagcaggggatactgaagctaataggcctagaactagtgctagccagttatatctatcatcttctgagcattgccaaacatcatttccatattttagatccagagtttcagctaaaaatggtgatagtacaagcaatgctgcccaccatgtcgtttcagtggattctattcgagctccaacatcaggaggtggttttcccagcataaagatgcagaagcaagttccagcacaatccacaaccaactccagtttgatgaatttctctcattttgcaagacctgctgctcttgcgaaagctaatcttcagaacattggcatgagagctggtacagggatttcaaacatggaaagaacgcaaaataaagataagggctcaattgcaagtagtagcaatccggctgaatgcactcccattaattcatgtagtggtttgctaaaggaaacgagctcccattgtcttcctgttctgatgccacccaaggttgacgctaaaccatcagaggctaagcctgcagaaggatttgttcctgctgagctacctgaggctacaattccagaaggtgactcaaaaagtgatagaaactgtcgtcaaaacttttgtgaaagtgcaattaaaggagtagcagatgttgagaagactaaagagcccgtggttgcttcttcttctgttggctcggacaatagtgtggagagagcttcggatgatccaactgagaatctgaagagaaaacatcgagatactgaggagtctgaaggtcctagtgaagatgtagaagaagaatctgtaggtgcaaaaaaacaagctcctgctcgagcaggtaatggctccaagagaaaccgggctgcagaagttcataatttatctgaaaggaggcgaagggataggatcaacgaaaagatgcgggccctacaagaactcataccaaactgtaacaaggtggataaagcttcaatgcttgatgaggccattgagtatttaaagacgcttcagcttcaagtacagatcatgtcaatgggagctggattgtatatgccatcaatgatgttaccccctggaatgcctcacatgcatgcagctcatatggggcagttcttacccatgggtgtgggaatgggaatgcgtatgggaatgggaatgggttttgggatgagtatgccagacgtgaatggtggatcttctggttgccctatgtatcaagtgcctcctatgcatggaccgcatttctctggccagccaatgtcagggctaagtgctttgcataggatgggaggatcgaatcttcagatgtttggcctttcaggtcaaggatttccaatgtcatttccctgtgcacccttagtgccaatgtctggagggcctcctctgaaaacaaacatggaaccaaatgcttgtggtgtggtaggtgctacggataatttggattcagctacggcctgtagttcacatgaagcaattcagaaaatcaactcgcaagtgatgcagaataatgttgtcaatagctcaatgaatcagacctctagtcagtgccaggcaacaaatgaatgctttgaacaacctgctttggtgcaaaataatgctcaagactcaggagttgctgacaacagagcattgaagtcggttggtggaaatgacaatgtaccaagtagtgaggctggtgagcatttgcaataa

SEQ ID NO: 341 - protein, 742 aa, Populus trichocarpa
MPLSELLYRMAKGKIDFSQEKDPSCSTDLSFVRPENDFGELIWENGQIQSSRARKIQPCSTLPCQNPKIRYKDIGNGTDIRTGKFGMMESTLNELPMSVPAVEMGVNQDDDMVPWLNYPLDESPQHDYCSEFLPELSGVTVNGHSSQSNFPSFGKKSFSQSVRDSRTVSVHNGLSLEQGDVAKNSSAGDTEANRPRTSASQLYLSSSEHCQTSFPYFRSRVSAKNGDSTSNAAHHVVSVDSIRAPTSGGGFPSIKMQKQVPAQSTTNSSLMNFSHFARPAALAKANLQNIGMRAGTGISNMERTQNKDKGSIASSSNPAECTPINSCSGLLKETSSHCLPVLMPPKVDAKPSEAKPAEGFVPAELPEATIPEGDSKSDRNCRQNFCESAIKGVADVEKTKEPVVASSSVGSDNSVERASDDPTENLKRKHRDTEESEGPSEDVEEESVGAKKQAPARAGNGSKRNRAAEVHNLSERRRRDRINEKMRALQELIPNCNKVDKASMLDEAIEYLKTLQLQVQIMSMGAGLYMPSMMLPPGMPHMHAAHMGQFLPMGVGMGMRMGMGMGFGMSMPDVNGGSSGCPMYQVPPMHGPHFSGQPMSGLSALHRMGGSNLQMFGLSGQGFPMSFPCAPLVPMSGGPPLKTNMEPNACGVVGATDNLDSATACSSHEAIQKINSQVMQNNVVNSSMNQTSSQCQATNECFEQPALVQNNAQDSGVADNRALKSVGGNDNVPSSEAGEHLQ

SEQ ID NO: 342 - DNA, 1716 bp, Populus trichocarpa
atgaatccttatgttcctgattttgaaatggacgatgattactctctcccacctcctccttcaacccatactcgccccagaaaaccagccatgcaggaagaagagatcatggagctactatggcagaacggccaagtagtgatgcatagtcaaagatctcaaaagaaatcatctcctccaccgtccgagttggatgatgcggtgctcccagctgatcaattacctggtactaaagagatccgatcatcacatgatcaacaacaagaacatcaccatctttttatgcaagaagatgagatggcttcttggcttaatcatcctctaaacgacaccaatttcgaccatgatttctgcgccgatttgctatatcctccgacagcttccaccgcttccatcaccagggaagctgctgtcaccaacgccgctgcgtctactgttcgaggtgcgactcagagaatggaagctaggagttatccggcggtatcggcgccgaggccgccgataccgccggtgaggagagcggaggtggtgcagaacttcgcgtacttctcgaggcaccgagcgggaggagtttcggaatctggacggtctaattcgaagagcgtggtgagggaatcgacggttgttgactcgtgtgagactccaacagcgagaatttcggagacggcgtttgctagaagtgcggataacacgtgtgggaccattaacggcgctgctgtagcaggcacggtttctagtgctccctcaagtaatagagagacgatgacgaatccttgtgagatgacctccacgtcatcacctggttgctcgagtgctagcgctgagctgccggctctgatgtctccagtggaagaccggaagcggaagggaagagaagaggaagctgagtgtcatagcgaggatgctgagtttgaatctgctgatgcaaagaaacgaattcgtggatcaatgtcttcgaagagatctcgtgcagcagaagttcacaacctatcagaaaggagacgccgagatcggatcaatgaaaagatgagggctttgcaagagctcatacctcgttgcaacaagtcggacaaagcttctatgttagatgaggcaattgagtacctgaaatcgcttcagttgcaagtacagatgatgtctatgggatgcagcatggtccccatgatgtttcctggcttccagcagtacatgccgccaatggggatagggatgggcatgggcatggaaatgggattgagtcggccaatgatgccatttcccaatattttggcgggtgcaccctcagcaacaccagctgcagcagctcatttggtccctaggttccctgtgccgccctttcatgtgccccccatccctgctcctgatccatccagagtccaaccaaccaaccaggtagatcctatgctaggctcaccaggtcaacagaatccaaaccaaccacgagtcccaaattttgttgatccatatcagcactatcttggcctctaccagatgcatttaccaggagtaccacggaaccaagctatggctcagccaagtaccagcaagccaagtactagtcgagtagctgagaatcctggcaatcaccagtcaggttgtgatggggaaaaaatggctcatgcttttccttcaagtcaggctaaaaaacaggagtggaaaatggggaaaggaataaatggagttatgctacgtgggtgtccacctctatctcaatag

SEQ ID NO: 343 - protein, 571 aa, Populus trichocarpa
MNPYVPDFEMDDDYSLPPPPSTHTRPRKPAMQEEEIMELLWQNGQVVMHSQRSQKKSSPPPSELDDAVLPADQLPGTKEIRSSHDQQQEHHHLFMQEDEMASWLNHPLNDTNFDHDFCADLLYPPTASTASITREAAVTNAAASTVRGATQRMEARSYPAVSAPRPPIPPVRRAEVVQNFAYFSRHRAGGVSESGRSNSKSVVRESTVVDSCETPTARISETAFARSADNTCGTINGAAVAGTVSSAPSSNRETMTNPCEMTSTSSPGCSSASAELPALMSPVEDRKRKGREEEAECHSEDAEFESADAKKRIRGSMSSKRSRAAEVHNLSERRRRDRINEKMRALQELIPRCNKSDKASMLDEAIEYLKSLQLQVQMMSMGCSMVPMMFPGFQQYMPPMGIGMGMGMEMGLSRPMMPFPNILAGAPSATPAAAAHLVPRFPVPPFHVPPIPAPDPSRVQPTNQVDPMLGSPGQQNPNQPRVPNFVDPYQHYLGLYQMHLPGVPRNQAMAQPSTSKPSTSRVAENPGNHQSGCDGEKMAHAFPSSQAKKQEWKMGKGINGVMLRGCPPLSQ

SEQ ID NO: 344 - DNA, 1347 bp, Populus trichocarpa
atgaatcattgtattcctgattggaattttgagggtgatcttcctgtctccaatcagaagaaacccatagagttgttgattttggttgccccatcttttaccttttgcaggccaggcaatgacctagtagagctgctatggcgaaatgggcaggtagttttgcatagccaggcacacagaaaaccaagccctcatgttcaaaaacatgattcaccaacagtaaagggcagtgggtcaattctgaattcaagccatttgattcaagatgatgacgctgtgtcttggattcaataccctcttgaagattcttttgaaaaggagttctgttccaattttttctcggaattgcctccaccactttctgatcaaattttggaaggaaagtcggctaaatttgatgcctccgcaccttcacagcaacagcatcagcatcagcatcagcgacaactcaacaacaataaacctcatgtggtttctgaattttcaggaaatccaatgccccctccaagaattcaagtcccggagaaaaatcatgctggtgtaggaggatttggtgaagctgttaatgctaacttttctcagttctccgccccctttaaaggaggtgattttagaacttcaagtggacaatttggaggccaggggtctggaaactctccacaaggggaggtcagggagtgttcggtggctgccgaactcgatctcgattcaatggcaggaaacaatccaaccaaacgatcaggatctacccgcaggagtcgtgcagctgaagtgcataacctctcagaaaggagacggagggataggattaatgagaagatgagagcattgcaagagctcatacctcactgctacaagacagataaagcatcaatgctggatgaggcaattgagtacttgaagtcacttcagttacaacttcaggtaatgtggatgggtggtgggatggcccctatgctgtttccaggagtgcagcatttcatgtctcgcatgggaatgggtccccctctgccttctatgcaaaatccaatgcatttgcctagggtccaactcattgatcaatccatttctatggctccgacacagaactcgggagtaatgtgccaagctccagtgttgaatccagttaattttcacaaccagatgcaaaatccggctttcgctgaccagtatgcgcgtttcatgggctttcatatgcaagccgcttctcagcccatgaatatgttccggtttggctcgcaaacagtacagcagaatcaaatgatggcaccaacaagcagtgttggcggacccttgagtgctggaaccgcagtcagtgacgctcctccaagtgacaaggtgggttaa

SEQ ID NO: 345 - protein, 448 aa, Populus trichocarpa
MNHCIPDWNFEGDLPVSNQKKPIELLILVAPSFTFCRPGNDLVELLWRNGQVVLHSQAHRKPSPHVQKHDSPTVKGSGSILNSSHLIQDDDAVSWIQYPLEDSFEKEFCSNFFSELPPPLSDQILEGKSAKFDASAPSQQQHQHQHQRQLNNNKPHVVSEFSGNPMPPPRIQVPEKNHAGVGGFGEAVNANFSQFSAPFKGGDFRTSSGQFGGQGSGNSPQGEVRECSVAAELDLDSMAGNNPTKRSGSTRRSRAAEVHNLSERRRRDRINEKMRALQELIPHCYKTDKASMLDEAIEYLKSLQLQLQVMWMGGGMAPMLFPGVQHFMSRMGMGPPLPSMQNPMHLPRVQLIDQSISMAPTQNSGVMCQAPVLNPVNFHNQMQNPAFADQYARFMGFHMQAASQPMNMFRFGSQTVQQNQMMAPTSSVGGPLSAGTAVSDAPPSDKVG

SEQ ID NO: 346 - DNA, 2142 bp, Populus trichocarpa
atgcctttgtctgagctcctataccgaatggctaagggaaaaactgattcttctcaagagaagaatcctgcttgttcaactgatctgtcttttgtacctgagaatgattttggtgagctaatatgggaaaatggtcagattcaatacagtagagctagaaagatacaaacttgtaacagcttacctcccaagattagagataaagacataggaaatggcaccaatactaaaacaggtaagtttggaacgatggagtctacactgaatgaactccttgcggttcctgctgttgaagtgagggcgaatcaagatgatgacatggtaccttggctgaattatccattggatgaacctctgcaacatgattattgttctgattttttgcccgaattatcgggggttactgtaaatgaacactcctcccagagtaattttccatcgtttgataaaagaagttgtaaccagtcaattacggactcccatactgtttcggtacacaatggtttgaacttagagcaaggagatgtggtgatgaattcttcagcaggagatattgatgctaagaggcctagaaccagtgctagtcagttatatccgtcatcttctgagcaatgcaaaacatcatttccgttttttagatccagggattcaactaaaaaagatgatagtacaagcaatgctgtccaccatgtcattgcaccagattctattcgagctccaacatcaggaggtggttttcccagcataaagatgcagaagcaagttccagcaccatcccctatcaactccagtttaattaatttctctcactttgcaagaccagctgctcttgtaaaagctaatcttcagaacgttggcatgagagctagttctggaacttcaagcatggaaagaatgcaaaataaagataagggctcaattggtttaccaaaggaaacggactcccattgccgtcctaatatgatgtcatccaaggttgaggttaaaccaacagaggttaagcctgctgaaggatctgttcctgctgagctacctgaggaaatgagccaagaaggtgactctaaaagcgatagaaactgtcatcaaaattttggtgaaagtgcaattaaaggattagaagatgttgaaaagactacagaacctctggttgcttcttcttctgttggttcgggcaatagcgcagagagaccttctgacgatccaactgagaatctgaagagaaaacatcgtgatactgaggagtctgaaggtcctagtgaagatgctgaagaagaatcagtaggtgcaaaaaaaccagcttctgctcgagcaggtaatgggtccaagagaggtcgggcagcagaagttcataacttatctgaaaggaggcgaagggataggatcaatgagaagatgcgagccctacaagaactcataccaaactgcaataaggtggataaagcttcaatgcttgatgaggccattgaatatttaaagactcttcagcttcaagtacaaattatgtcaatgggagctggaatgtacatgccatcaatgatgttacctcctggaatgcctcacatgcatgcagctcatatggggcagttcttacccatgggtgttggaatgggaatgggtttccggatgggtatgcctgacatgaatggtggatattctggttgccctatgtatcaagtacctcctatgcatggagcacatttccctggctcgcaaatgtcagggcctagtgctttgcacgggatgggaggacctagtcttcagatgtttgggctttctggtcaaggacttccaatgtcatttcctcgtgcacccttaatgccaatgtctggagggcctcctccgaaaacaaacagggaaccaaatgcttgtggggtggtaggtcctatggataatttggattcagctacagcctctagttcaaaggatgcaattcagaatatcaactcgcaagtgatgcagaacaatgttgccaataggtcaatgaatcagacctctagtcagtgccaagcaacaaatgaatgttttgaacagcctgcttttgcgcaaaataatggtgaaggctcagaagttgctgaaagtggagtgttgaagtcagctggtggaactgacatcacacctagtagagcaactggttgtgactga

SEQ ID NO: 347 - protein, 713 aa, Populus trichocarpa
MPLSELLYRMAKGKTDSSQEKNPACSTDLSFVPENDFGELIWENGQIQYSRARKIQTCNSLPPKIRDKDIGNGTNTKTGKFGTMESTLNELLAVPAVEVRANQDDDMVPWLNYPLDEPLQHDYCSDFLPELSGVTVNEHSSQSNFPSFDKRSCNQSITDSHTVSVHNGLNLEQGDVVMNSSAGDIDAKRPRTSASQLYPSSSEQCKTSFPFFRSRDSTKKDDSTSNAVHHVIAPDSIRAPTSGGGFPSIKMQKQVPAPSPINSSLINFSHFARPAALVKANLQNVGMRASSGTSSMERMQNKDKGSIGLPKETDSHCRPNMMSSKVEVKPTEVKPAEGSVPAELPEEMSQEGDSKSDRNCHQNFGESAIKGLEDVEKTTEPLVASSSVGSGNSAERPSDDPTENLKRKHRDTEESEGPSEDAEEESVGAKKPASARAGNGSKRGRAAEVHNLSERRRRDRINEKMRALQELIPNCNKVDKASMLDEAIEYLKTLQLQVQIMSMGAGMYMPSMMLPPGMPHMHAAHMGQFLPMGVGMGMGFRMGMPDMNGGYSGCPMYQVPPMHGAHFPGSQMSGPSALHGMGGPSLQMFGLSGQGLPMSFPRAPLMPMSGGPPPKTNREPNACGVVGPMDNLDSATASSSKDAIQNINSQVMQNNVANRSMNQTSSQCQATNECFEQPAFAQNNGEGSEVAESGVLKSAGGTDITPSRATGCD

SEQ ID NO: 348 - DNA, 1593 bp, Populus trichocarpa
atgaatcattgcattcctgattggaatcttgagggtgatcttcctgtctccaatcagaagaaccccatagagccagacaatgagctagtagagctgctatggcgaaatgggcaggtggttatgcacagccaaacacaaagaaaaccaaatcctcacgttcaaaaacatgattcaccaacagtaaggggctatgactcaactctgaattcaagtcatttgattcaagatgatgagacagtttcttggattcatgaccctcttgaagattcctttgaaaaggagttctgttccaattttttctccgaattgccaccaccgctttctgatcaaatttcagaagaaaagtcggctaaatttgatgcctcgaaaacttcacatcagcaacaacaactcaacaacaacaagcatccagtggttcctgaatttccaggaaacccaatgccccctccaagaattcaagtccaggagcaaaatcatattagtgtaggaggatttggtaaagctgttaatgttaacttttctcagttctcagctcccctaaaagtgggtgattttagatcttcaagtcgacaatttggaggacaggggtctggagatttttcacaaggagaggccagggagtgctcggtggtgacagtagggtcaagcaaccaaactccacgtgaccgtttcctgagccgtgcttctggtaatgctattgagaccggtacaggcttgtctgccggaccctccatagatgatccacgaaaagtaatctcccagagcgagagaggcaaagctgatcagacacttgatcctactgctacttcatcctcaggtgggtcaggtggtagttttgctagaacatgtaagcaatctgcagtacctagtcgtggccagaaaagaaagaccatggacgcggaggaatctgagtgccaaagtgaggatgccgaacttgattcagcagtggaaaacaagccagccaaacgatcaggatctacccgcaggagccgtgcagctgaagtgcataacctctcagaaaggagacggagggatagaattaatgagaagatgagagcattgcaagagctcatacctcactgcaacaagacagataaagcatcaatgttagatgaggcaattgagtacttgaagtcacttcaattacaacttcaggtaatgtggatgggaagtgggattgtcccagtgatgtttccaggagtgcagcatttcatgtcccgcatgggaatgggaatgggaatgggtccgcctcctttgccttctatgcaaaatcctatgcatttgcctagggtcccacttgttgatcaatccatttctatggctcccacacagaaccaggcagtaatttgccaaactccagtactgaatccagttaattatcaaaatcagatgcaaaatcctactttctctgatcagtatgcacgtttcatgggttttcatatgcaagctgcttctcagcccatgaatatgttccggtttggctcgcaaacagtacagcagaaccaaatgatggcaccaccaaacagtggcggtggacccttgagtgctggaactgcagccagtgatgctcctccgagtggcaagacgggttaa

SEQ ID NO: 349 - protein, 530 aa, Populus trichocarpa
MNHCIPDWNLEGDLPVSNQKNPIEPDNELVELLWRNGQVVMHSQTQRKPNPHVQKHDSPTVRGYDSTLNSSHLIQDDETVSWIHDPLEDSFEKEFCSNFFSELPPPLSDQISEEKSAKFDASKTSHQQQQLNNNKHPVVPEFPGNPMPPPRIQVQEQNHISVGGFGKAVNVNFSQFSAPLKVGDFRSSSRQFGGQGSGDFSQGEARECSVVTVGSSNQTPRDRFLSRASGNAIETGTGLSAGPSIDDPRKVISQSERGKADQTLDPTATSSSGGSGGSFARTCKQSAVPSRGQKRKTMDAEESECQSEDAELDSAVENKPAKRSGSTRRSRAAEVHNLSERRRRDRINEKMRALQELIPHCNKTDKASMLDEAIEYLKSLQLQLQVMWMGSGIVPVMFPGVQHFMSRMGMGMGMGPPPLPSMQNPMHLPRVPLVDQSISMAPTQNQAVICQTPVLNPVNYQNQMQNPTFSDQYARFMGFHMQAASQPMNMFRFGSQTVQQNQMMAPPNSGGGPLSAGTAASDAPPSGKTG

SEQ ID NO: 350 - DNA, 1524 bp, Solanum lycopersicum
atgatcttgaattggtttcaattggatggtcttttctgtagatttgatcatgagctagtggagttgttgtggcgaaacggggaggtagtattacatagccaaacacataaaaaacagccaggttatgatcctaatgaatgcagacagtttaacaaacatgatcaaccaacaataagagttgctggaaatcagactaatttgattcaagatgatgaaactgtcgcgtggctaaactgccctatcgatgattcgtttgacaaagaattttgttcccctttcttatctgatatttcaacaaatcctcacctgggggaggagcctgataagtcaattaggcaatcagaggacaataacaaggttttcaagtttgatcctttagagatcaaccatgttcttccgcaatcacatcattctggtttcgatccaaatccaatgccacctccaagatttcacaactttggatcagcgcaacagaaacatcatatagtagggggggatcagaaaggtgttaactttcctccaccgataaggtcatccaatgtgcagcttggtggcaaagaagctagaagcaatctgatgctgcaagatattaaagaggggtctgtgatgacagttggttcaagccactgtggcagcaatcaagttgatactagccggttttcaagtagtgcaaatagagggctgtctgcagcaatgatcactgattataccggaaaaatcagtccacaaagtgatacaatggaccgagacacatttgaaccagctaatacatcttcgtcttcaggaagatcgggtagtagttatgcaagagcatgcaatcaatctacagcgaccaatagccagggccacaaaaggaagagtagagatggtgaagaaccagaatgccagagtaaagctgatgagctagaatcagctggaggaaacaagtcagcccaaaaatctggaactgcccgaaggagccgtgctgcagaagtgcataatctctctgaaaggagacggagggatagaatcaatgagaaaatgaaggccttgcaagagcttcttcctcactctactaagacagacaaagcatcaatgctggatgaggctattgaatacttgaaatcacttcagatgcaactgcagatgatgtggatgggaagtggcatggcatcaatgatgttccctggtgtccaacactacatttccagaatgggaatggggatgggtccgccttcggtgccttccatgcacaatgctatgcatttagctaggcttcctttggttgatccagcaatccctttgacacaagctgcccctaataatcaagcagctgcaatgtgccagaattcaatgttgaatcaagttaactatcaacgccatttgcagaatcccaattttccagatcaatatgctagttacatggggttccatccacttcaaggcgcttctcagcctataaacatttttggcttaggttcacatacagcacagcaaactcagcagttaccgcatccaactaatagtaatgcacctgccacttga

SEQ ID NO: 351 - protein, 507 aa, Solanum lycopersicum
MILNWFQLDGLFCRFDHELVELLWRNGEVVLHSQTHKKQPGYDPNECRQFNKHDQPTIRVAGNQTNLIQDDETVAWLNCPIDDSFDKEFCSPFLSDISTNPHLGEEPDKSIRQSEDNNKVFKFDPLEINHVLPQSHHSGFDPNPMPPPRFHNFGSAQQKHHIVGGDQKGVNFPPPIRSSNVQLGGKEARSNLMLQDIKEGSVMTVGSSHCGSNQVDTSRFSSSANRGLSAAMITDYTGKISPQSDTMDRDTFEPANTSSSSGRSGSSYARACNQSTATNSQGHKRKSRDGEEPECQSKADELESAGGNKSAQKSGTARRSRAAEVHNLSERRRRDRINEKMKALQELLPHSTKTDKASMLDEAIEYLKSLQMQLQMMWMGSGMASMMFPGVQHYISRMGMGMGPPSVPSMHNAMHLARLPLVDPAIPLTQAAPNNQAAAMCQNSMLNQVNYQRHLQNPNFPDQYASYMGFHPLQGASQPINIFGLGSHTAQQTQQLPHPTNSNAPAT

SEQ ID NO: 352 - DNA, 1914 bp, Oryza sativa
atgtccgacggcaacgacttcgccgagctgctgtgggagaacggccaggcggtggtgcacgggaggaagaagcacccgcagccggccttcccgccgttcggcttcttcggtggcaccggcggtggcggcggcggcagcagtagtagagcccaggagaggcagcccggcggcatcgatgcgttcgccaaggtggggggcggcttcggcgccttgggcatggctccggcggtgcacgacttcgcttctggcttcggcgccaccacgcaggacaacggtgatgatgacaccgttccgtggatccattaccccataattgacgatgaagacgccgccgcccctgctgctctcgcagcagcggactatggctccgacttcttctccgagctccaggcggcggcggctgccgcggcggccgccgcgccgccgaccgatctcgcctctctgccagcctccaatcacaacggcgccaccaataacagaaatgctccggttgccaccaccaccaccagggaaccctccaaggaaagccacggcggcctgtcggttcccaccacccgagccgagccgcagccgcagccacagctcgccgcagccaagctgcctcggtcgagcggcagcggcggcggcgagggcgtgatgaacttctcgctcttctcccgcccggccgtcctggcgagggcgacgctggagagcgcgcagaggacgcagggcaccgacaataaggcgtccaatgtcaccgcgagcaaccgcgtcgagtcgacggtcgtgcagacggcgagcgggccaaggagcgcaccggcgttcgccgatcagagggcggcggcgtggccgccgcagccgaaggagatgccgttcgcgtccacggcagccgctcccatggccccggccgttaacctgcaccacgagatgggccgtgacagggcaggccgaaccatgcctgtccacaaaaccgaggcgaggaaggcacctgaggccacggtcgcgacatcgtcggtgtgctccggcaacggagctgggagtgacgagctgtggcgccagcagaagcggaagtgccaggcccaggcagagtgctcagctagccaagacgatgatcttgacgatgaacctggagtattgagaaaatctggaaccaggagcacgaaacgcagccgcacagctgaggttcacaatttatcagaaaggaggagaagggacaggatcaatgaaaagatgcgcgctctgcaagaactcattcccaactgcaacaagattgataaagcctcgatgctggatgaagctatagagtacctcaaaacccttcagcttcaagtacagatgatgtccatgggaactgggctgtgcattcctccaatgctattaccaacagccatgcagcacttgcaaattccaccgatggctcatttccctcatctcggcatgggattggggtacgggatgggcgtcttcgacatgagcaacactggagcacttcagatgccacccatgcctggtgctcactttccctgcccaatgatcccaggtgcgtcaccacaaggtcttgggatccctggcacaagcaccatgccaatgtttggggttcctgggcaaacaattccttcgtcagcgtctagtgtaccaccatttgcatctttggctggtcttcctgttaggccaagcggggtccctcaagtatcaggcgccatggctaacatggtgcaagaccagcaacaaggcatagcgaatcaacagcagcaatgtctgaacaaggaagctatacagggagcaaatccaggtgattcacaaatgcagatcatcatgcagggtgacaacgagaattttaggataccctcttcagcccaaacaaaaagcagtcaattttcagatggtaccggcaaggggaccaacgctagagagagagatggggctgaaacataa

SEQ ID NO: 353 - protein, 637 aa, Oryza sativa
MSDGNDFAELLWENGQAVVHGRKKHPQPAFPPFGFFGGTGGGGGGSSSRAQERQPGGIDAFAKVGGGFGALGMAPAVHDFASGFGATTQDNGDDDTVPWIHYPIIDDEDAAAPAALAAADYGSDFFSELQAAAAAAAAAAPPTDLASLPASNHNGATNNRNAPVATTTTREPSKESHGGLSVPTTRAEPQPQPQLAAAKLPRSSGSGGGEGVMNFSLFSRPAVLARATLESAQRTQGTDNKASNVTASNRVESTVVQTASGPRSAPAFADQRAAAWPPQPKEMPFASTAAAPMAPAVNLHHEMGRDRAGRTMPVHKTEARKAPEATVATSSVCSGNGAGSDELWRQQKRKCQAQAECSASQDDDLDDEPGVLRKSGTRSTKRSRTAEVHNLSERRRRDRINEKMRALQELIPNCNKIDKASMLDEAIEYLKTLQLQVQMMSMGTGLCIPPMLLPTAMQHLQIPPMAHFPHLGMGLGYGMGVFDMSNTGALQMPPMPGAHFPCPMIPGASPQGLGIPGTSTMPMFGVPGQTIPSSASSVPPFASLAGLPVRPSGVPQVSGAMANMVQDQQQGIANQQQQCLNKEAIQGANPGDSQMQIIMQGDNENFRIPSSAQTKSSQFSDGTGKGTNARERDGAET

SEQ ID NO: 354 - DNA, 2199 bp, Populus trichocarpa
atggctaaaggaaagattgatttttctcaagagaaggatcctagttgttcaactgatctgtcttttgtacctgagaatgactttggtgagctaatatgggaaaatggtcagattcaatccagtagagctagaaagatacaaccttgtagcaccttaccatgtcaaaaccccaagattcgatataaagacataggaaatggcaccgatattagaacaggaaagtttgggatgatggagtctacactgaatgaactcccgatgtcagttcccgctgttgaaatgggggtgaatcaagatgatgacatggtgccttggttgaattatccattggatgaatctcctcaacatgattattgttctgaatttttgcccgagttatctggtgttactgtaaatggacactcctcccagagtaattttccgtcgtttggtaaaaaaagttttagccagtcagttagggactcccgtactgtttctgtacataatggtttgagtttagagcaaggagatgtggcgaagaattcttcagcaggggatactgaagctaataggcctagaactagtgctagccagttatatctatcatcttctgagcattgccaaacatcatttccatattttagatccagagtttcagctaaaaatggtgatagtacaagcaatgctgcccaccatgtcgtttcagtggattctattcgagctccaacatcaggaggtggttttcccagcataaagatgcagaagcaagttccagcacaatccacaaccaactccagtttgatgaatttctctcattttgcaagacctgctgctcttgcgaaagctaatcttcagaacattggcatgagagctggtacagggatttcaaacatggaaagaacgcaaaataaagataagggctcaattgcaagtagtagcaatccggctgaatgcactcccattaattcatgtagtggtttgctaaaggaaacgagctcccattgtcttcctgttctgatgccacccaaggttgacgctaaaccatcagaggctaagcctgcagaaggatttgttcctgctgagctacctgaggctacaattccagaaggtgactcaaaaagtgatagaaactgtcgtcaaaacttttgtgaaagtgcaattaaaggagtagcagatgttgagaagactaaagagcccgtggttgcttcttcttctgttggctcggacaatagtgtggagagagcttcggatgatccaactgagaatctgaagagaaaacatcgagatactgaggagtctgaaggtcctagtgaagatgtagaagaagaatctgtaggtgcaaaaaaacaagctcctgctcgagcaggtaatggctccaagagaaaccgggctgcagaagttcataatttatctgaaaggaggcgaagggataggatcaacgaaaagatgcgggccctacaagaactcataccaaactgtaacaaggtggataaagcttcaatgcttgatgaggccattgagtatttaaagacgcttcagcttcaagtacagatcatgtcaatgggagctggattgtatatgccatcaatgatgttaccccctggaatgcctcacatgcatgcagctcatatggggcagttcttacccatgggtgtgggaatgggaatgcgtatgggaatgggaatgggttttgggatgagtatgccagacgtgaatggtggatcttctggttgccctatgtatcaagtgcctcctatgcatggaccgcatttctctggccagccaatgtcagggctaagtgctttgcataggatgggaggatcgaaccttcagatgtttggcctttcaggtcaaggatttccaatgtcatttccctgtgcacccttagtgccaatgtctggagggcctcctctgaaaacaaacatggaaccaaatgcttgtggtgtggtaggtgctacggataatttggattcagctacggcctgtagttcacatgaagcaattcagaaaatcaactcgcaagtgatgcagaataatgttgtcaatagctcaatgaatcagacctctagtcggtgccaggcaacaaatgaatgctttgaacaacctgctttggtgcaaaataatgatcaagactcaggagttgctgacaacagagcattgaagtcggttggtggaaatgacaatgtaccaagtagtgaggctggtgagcatttgcaataa

SEQ ID NO: 355 - protein, 732 aa, Populus trichocarpa
MAKGKIDFSQEKDPSCSTDLSFVPENDFGELIWENGQIQSSRARKIQPCSTLPCQNPKIRYKDIGNGTDIRTGKFGMMESTLNELPMSVPAVEMGVNQDDDMVPWLNYPLDESPQHDYCSEFLPELSGVTVNGHSSQSNFPSFGKKSFSQSVRDSRTVSVHNGLSLEQGDVAKNSSAGDTEANRPRTSASQLYLSSSEHCQTSFPYFRSRVSAKNGDSTSNAAHHVVSVDSIRAPTSGGGFPSIKMQKQVPAQSTTNSSLMNFSHFARPAALAKANLQNIGMRAGTGISNMERTQNKDKGSIASSSNPAECTPINSCSGLLKETSSHCLPVLMPPKVDAKPSEAKPAEGFVPAELPEATIPEGDSKSDRNCRQNFCESAIKGVADVEKTKEPVVASSSVGSDNSVERASDDPTENLKRKHRDTEESEGPSEDVEEESVGAKKQAPARAGNGSKRNRAAEVHNLSERRRRDRINEKMRALQELIPNCNKVDKASMLDEAIEYLKTLQLQVQIMSMGAGLYMPSMMLPPGMPHMHAAHMGQFLPMGVGMGMRMGMGMGFGMSMPDVNGGSSGCPMYQVPPMHGPHFSGQPMSGLSALHRMGGSNLQMFGLSGQGFPMSFPCAPLVPMSGGPPLKTNMEPNACGVVGATDNLDSATACSSHEAIQKINSQVMQNNVVNSSMNQTSSRCQATNECFEQPALVQNNDQDSGVADNRALKSVGGNDNVPSSEAGEHLQ

SEQ ID NO: 356 - DNA, 1269 bp, Zea mays
atggacggcaatgcgaggtcggcggcaacgaatcagaagaagcccgtcgtcgcggacgacgacctcgtggagctgctgtggcacaacgggagcgtcgtcgcgcagccccaggcgcaccagaggccggcgcccacctacgaccccgaccgcccgggcaccagcggcctcaccggcgaagagaccgccgcgtggttcccggacaccctcgacgacgcgctggagaaggacctgtacacgcagctctggtacagcaccatcgccgacgccgccccgcagcacgagggcacgctcccgggccctacctcgcagccttcgccttcgccgcccgttgggagcagcggcgtcgagtcgagctgggctggcgacatctgctcgaccttctgcggaagcaaccaggtgctcaggacgccggcaaggatcagggggaaggacgcggcattgcagtcggagttgccgagcaataccggcgcgcacgacggcacatcgtcatccggcgggtctggaagcaactatgggggattcgggctgcccagtgacagcgtccatgtacagaagaggaaggggaggtgtagagacgactcagatagtccgagtgaggatgccgagtgtgaggaggcaagtgaggaaacgaaaccatcaaggcgatatgggacgaaacgccggactcgtgcagctgaagttcacaatctttcagagaggagaagaagggaccggatcaatgaaaagatgcgcgcattgcaagagctcatcccgcattgcaacaagactgacaaagcgtcgatattagacgagacgattgagtatctgaagtccctccaaatgcaagttcagatcatgtggatgacttctgggatggcgccaatgatgtttcctggtgttcaccaattcattccacagatggctctaggaatgaatccaggttgcatccctgcagcacagggcctaagtcagatgccaagattaccatacatgaaccacaccctgccaaaccatatccatctgaactcgtctccagctatgaatctaatgaatccactgaacgccgcgaaccaggtgcaaatcggtcacctcagggatgcaagtagccacttgcttcacctagatggcgggcgagcagcagtggtacctcaggtaccaggaccaggaccccatgttcatggacatcaaatagcacaagccgaagaacacaataagatactggaagtggcagctagtactgttataccaacttctaaggcagggcaaccaccaactttacatagagtttag

SEQ ID NO: 357 - protein, 422 aa, Zea mays
MDGNARSAATNQKKPVVADDDLVELLWHNGSVVAQPQAHQRPAPTYDPDRPGTSGLTGEETAAWFPDTLDDALEKDLYTQLWYSTIADAAPQHEGTLPGPTSQPSPSPPVGSSGVESSWAGDICSTFCGSNQVLRTPARIRGKDAALQSELPSNTGAHDGTSSSGGSGSNYGGFGLPSDSVHVQKRKGRCRDDSDSPSEDAECEEASEETKPSRRYGTKRRTRAAEVHNLSERRRRDRINEKMRALQELIPHCNKTDKASILDETIEYLKSLQMQVQIMWMTSGMAPMMFPGVHQFIPQMALGMNPGCIPAAQGLSQMPRLPYMNHTLPNHIHLNSSPAMNLMNPLNAANQVQIGHLRDASSHLLHLDGGRAAVVPQVPGPGPHVHGHQIAQAEEHNKILEVAASTVIPTSKAGQPPTLHRV

SEQ ID NO: 358 - protein, 70 aa, Artificial sequence
  motif 7
  VARIANT (1)..(1): / replace = "Lys" / replace = "Gly"
  VARIANT (2)..(2): / replace = "Thr" / replace = "Gly"
  VARIANT (3)..(3): / replace = "Gly"
  VARIANT (4)..(4): / replace = "Ser"
  VARIANT (5)..(5): / replace = "Ala" / replace = "Ser"
  VARIANT (6)..(6): / replace = "Arg"
  VARIANT (8)..(8): / replace = "Ser"
  VARIANT (30)..(30): / replace = "Lys"
  VARIANT (38)..(38): / replace = "Asn" / replace = "Arg"
  VARIANT (42)..(42): / replace = "Ser"
  VARIANT (47)..(47): / replace = "Ile"
  VARIANT (60)..(60): / replace = "Met"
  VARIANT (62)..(62): / replace = "Leu"
  VARIANT (64)..(64): / replace = "Met"
  VARIANT (66)..(66): / replace = "Ser"
  VARIANT (69)..(69): / replace = "Gly" / replace = "Cys"
RSTTTKRRRAAEVHNLSERRRRDRINEKMRALQELIPHCNKTDKASMLDEAIEYLKSLQLQVQIMWMGSG

SEQ ID NO: 359 - protein, 18 aa, Artificial sequence
  motif 8
  VARIANT (1)..(1): / replace = "Ile"
  misc_feature (2)..(2): Xaa can be any naturally occurring amino acid
  VARIANT (3)..(3): / replace = "Glu"
  VARIANT (4)..(4): / replace = "Glu"
  VARIANT (5)..(5): / replace = "Asp"
  VARIANT (6)..(6): / replace = "Gly" / replace = "Asp"
  VARIANT (13)..(13): / replace = "Cys" / replace = "Glu"
  VARIANT (16)..(16): / replace = "His" / replace = "Gly"
LXPDNELVELLWQNGQVV

SEQ ID NO: 360 - protein, 13 aa, Artificial sequence
  motif 9
  VARIANT (1)..(1): / replace = "Asp" / replace = "Asn" / replace = "Gly"
  VARIANT (3)..(3): / replace = "Ile"
  VARIANT (6)..(6): / replace = "Gln"
  VARIANT (8)..(8): / replace = "Gln" / replace = "Lys" / replace = "Cys"
  VARIANT (9)..(9): / replace = "Asn"
  VARIANT (11)..(11): / replace = "Glu" / replace = "His"
ELVELLWRDGQVV

SEQ ID NO: 361 - protein, 7 aa, Artificial sequence
  motif 10
RAAEVHN

SEQ ID NO: 362 - protein, 11 aa, Artificial sequence
  motif 11
SERRRRDRINE

SEQ ID NO: 363 - protein, 27 aa, Artificial sequence
  motif 12
  VARIANT (6)..(6): / replace = "Ile"
  VARIANT (8)..(8): / replace = "Glu"
  VARIANT (12)..(12): / replace = "Asp"
  VARIANT (19)..(19): / replace = "Phe"
  VARIANT (23)..(23): / replace = "Val" / replace = "Leu"
TDKASMLDEAIEYLKSLQLQLQMMWMG

SEQ ID NO: 364 - DNA, 54 bp, Artificial sequence
  primer: prm12326
ggggacaagtttgtacaaaaaagcaggcttaaacaatgaaccagttcgtccctg

SEQ ID NO: 365 - DNA, 50 bp, Artificial sequence
  primer: prm12327
ggggaccactttgtacaagaaagctgggtcagaatgtcgtcaggagtcag

SEQ ID NO: 366 - DNA, 2194 bp, Oryza sativa; identical to SEQ ID NO: 289

SEQ ID NO: 367 - DNA, 1224 bp, Populus trichocarpa
atgaactctgcttctcttagcagtgcgtgcagttgcttaacatggagaacctcttcaatcgtgcccgtacagctagggtttaatcactctacaaaatataaatcttctccccgaagattccacatcgcctgctcatccgcctcctcttcttctgatccattgttggtaaaggctgcgaaaggagaaccagtaagtaggcctccggcatggatgatgcgtcaagcaggaaggtatatggctgtttacagaaagcttgcagagaaatatccatcctttagagagaggtcagagacgacagatctcattgtggaaatttctttgcagccttgggaagcttttcatcctgatggagttattattttctccgacatacttacacctctacctgcatttggtgtgccgtttgacatagaagaagtgaggggccctgttattcaatctccaattcgttctgaagaaggtttgaaggctttgcatccgattgaattagagaaacttcagtttgtgggagactcgcttaggatattgcgcaatgaggttgaggggcgtgctgcagttttgggttttgtaggagcaccttggacaatagctacctatatagtggaagggggtacaactcgtacatatacaaacataaagagcatgtgccatacagcaccacaagtgttaagggctctcctctcacatctgacaaaggcgatgtctgactacattgtttttcaagttgagtctggggctcattgcatacaaatatttgactcgtggggtggacagctacctcctgacatgtgggatcgttggtcaaagccatatattgaagagatagtcagtacagtcaggaataaatgccctgaaacgccattggttctttacatcaatggaaatggtggccttctagagcgtatgaagggaactggagtcgatgtgattgggctggactggactgtggatttggcagatggaaggaagcgtttggggagtgggatcagtgtacaaggaaatgtggaccctgcttacttattttcaccacttccagcattgactgatgaaattcaaagagttgtgagatgtgctgggccgaggggacatattcttaatcttgggcatggtgttcttgttggtacaccagaagaagctgttgcacacttttttgaagttgctagaagcttgaagtttactacacctcaaggccatgtggtggaagaaccaaaattggtagtttaa

SEQ ID NO: 368 - protein, 407 aa, Populus trichocarpa
MNSASLSSACSCLTWRTSSIVPVQLGFNHSTKYKSSPRRFHIACSSASSSSDPLLVKAAKGEPVSRPPAWMMRQAGRYMAVYRKLAEKYPSFRERSETTDLIVEISLQPWEAFHPDGVIIFSDILTPLPAFGVPFDIEEVRGPVIQSPIRSEEGLKALHPIELEKLQFVGDSLRILRNEVEGRAAVLGFVGAPWTIATYIVEGGTTRTYTNIKSMCHTAPQVLRALLSHLTKAMSDYIVFQVESGAHCIQIFDSWGGQLPPDMWDRWSKPYIEEIVSTVRNKCPETPLVLYINGNGGLLERMKGTGVDVIGLDWTVDLADGRKRLGSGISVQGNVDPAYLFSPLPALTDEIQRVVRCAGPRGHILNLGHGVLVGTPEEAVAHFFEVARSLKFTTPQGHVVEEPKLVV

SEQ ID NO: 369 - DNA, 1170 bp, Aureococcus anophagefferens
atgctcgcgctgctgtgctccctggccctgacgagctcgctcgtcgcgtccaaggtgagcgcgccgtcgccccggcgcgacgtgtcggcggccggtgcggcgacggacgacgcccccctgctgctgcgcgcggcgcgcggcgaggccgtggagcggacgcccgtgtggatgatgcgccaggccgggcgccacatgcaggtctaccgggacctcgtcaagaagtacccgacgttccgcgagcggagcgagatccccgaggccgcgctcgagatcagcctccagccgtgggaggcgtacggcgtcgacggcgtcatcctcttcagcgacattttgacgcccctgccggccatgggcgtcgacttccagatcagcgagggcggcgccatcgccatctcgcccatccgcacggaggcccacctcgcggagctgaaaaaggcgaatttcgacgcggcgacggcgtgccccttcgtcggcgaggtcctgggcaagctccgggacaaagtcgggtccagcgccacggtgctcggcttcgtcggcctccccttcacgctcgcgtcctacctcgtcgagggcaagacgggcacgacgtccgggttcgcggaggtggggaaaatgaggagcgagcagccggagctcctccacggcatcctcgacctcctcgcggagaacatcggcgcctacgcctgctaccaggtcgagtccggcgcccaggtcatccaggtcttcgactcctgggcgggccacctccccgaggaccagtacctcgaattcgccgtgccctaccaaaagaaggtcatcgaggccatcaaggccaagcacccggagacgcccgtcatcatctacatggcgccggacgtccactcgaaggacggcggcttcctcgaccacctcgcggcctccggcgcggactgcgtctccgtcgactacaccgtcgacttcggcgagacgcgcgcgaggctcccggccggagtggccatgcagggcaacctcgacccgaagatcctccgcgacgggcccctcgacaagatcaaggaggagacggagaagatcctcgccgcgggcaactgcaacatgcacatcatgaacctcggccacggcatcgaggccgacacgcccgagccgcacgcgaagttcttcgtggacacggtccaggcgttccgcgccaagtag

SEQ ID NO: 370 - protein, 389 aa, Aureococcus anophagefferens
MLALLCSLALTSSLVASKVSAPSPRRDVSAAGAATDDAPLLLRAARGEAVERTPVWMMRQAGRHMQVYRDLVKKYPTFRERSEIPEAALEISLQPWEAYGVDGVILFSDILTPLPAMGVDFQISEGGAIAISPIRTEAHLAELKKANFDAATACPFVGEVLGKLRDKVGSSATVLGFVGLPFTLASYLVEGKTGTTSGFAEVGKMRSEQPELLHGILDLLAENIGAYACYQVESGAQVIQVFDSWAGHLPEDQYLEFAVPYQKKVIEAIKAKHPETPVIIYMAPDVHSKDGGFLDHLAASGADCVSVDYTVDFGETRARLPAGVAMQGNLDPKILRDGPLDKIKEETEKILAAGNCNMHIMNLGHGIEADTPEPHAKFFVDTVQAFRAK

SEQ ID NO: 371 - DNA, 1185 bp, Arabidopsis thaliana
atgtcaatccttcaagtctctacttcgtctctttcttcttctactcttctctccatatctcccagaaaatctctctcatctaccaagtcatgccggatagttcgatgttccgtcgagggaactactgtaaccgagagaaaagtctcggcaaccagcgagccacttcttctgagagctgttaaaggtgaagttgttgatagacctccggtttggcttatgaggcaagctgggaggtacatgaagagttatcaaactctctgtgagaagtatccttctttcagagatagatcagagaatgcagatcttgtggtggaaatttctttgcagccatggaaggtgtttaagccagatggggtgattctgttctcagacattctcactccattgtctggaatgaacatacctttcgacattgttaaaggaaaaggtcctatcatctttaacccgcctcaatcagctgccgacgttgctcaagttagagaattcgtaccagaggaatctgttccttatgttggagaagcactcagaagattaagaaatgaggtgaacaatgaagccgctgttctgggatttgttggagctccatttacactttcttcgtatgtaatcgaaggtggctcatctaagaacttcacacagataaaaagattagctttttctcaacccaaggttctacatgccttactccagaagttcacaacctcgatgataacgtacatacgctatcaagcagatagcggagctcaagctgtgcaaatattcgactcttgggcaaccgagcttagcccggtggattttgaggagtttagcttaccttatctcaaacagattgtggaagctgtgaaacaaactcacccaaacctacctctcatactttatgctagtggatcaggaggtttgctagagagactggctcggaccggtgtggatgttgtgagcttggactggactgtggacatggctgaaggaagagaccggctaggaagagacatagcagttcaaggaaacgttgatccgggagttctatttggatcgaaagaatttatcacaagccggattcatgatactgtgaagaaagctgggagagataaacacattctcaacttggggcatggtattaaagttggaacccctgaagagaatgtagcacacttctttgaggttgctcaagaaattagatattaa

SEQ ID NO: 372 - protein, 394 aa, Arabidopsis thaliana
MSILQVSTSSLSSSTLLSISPRKSLSSTKSCRIVRCSVEGTTVTERKVSATSEPLLLRAVKGEVVDRPPVWLMRQAGRYMKSYQTLCEKYPSFRDRSENADLVVEISLQPWKVFKPDGVILFSDILTPLSGMNIPFDIVKGKGPIIFNPPQSAADVAQVREFVPEESVPYVGEALRRLRNEVNNEAAVLGFVGAPFTLSSYVIEGGSSKNFTQIKRLAFSQPKVLHALLQKFTTSMITYIRYQADSGAQAVQIFDSWATELSPVDFEEFSLPYLKQIVEAVKQTHPNLPLILYASGSGGLLERLARTGVDVVSLDWTVDMAEGRDRLGRDIAVQGNVDPGVLFGSKEFITSRIHDTVKKAGRDKHILNLGHGIKVGTPEENVAHFFEVAQEIRY

SEQ ID NO: 373 - DNA, 1257 bp, Arabidopsis thaliana
atgagcttatcatcgccaaccagtgcttgtagctcgtccagatgttactcctcgggattatcgtttccgattggatttggatcgaatcccatcaatgtgggattggtttgttacccaaaaagatacagtattgctgctcggaagttcgtagtggcttgctcctcctcctcttccgatccacttttggttaaggctgcaaaagggcaagccataagtcgtcctccagcttggatgatgaggcaagcaggaaggtatatggctgtttaccaaaagctcgccaagaaacatccgtccttcagagagagatcagagaacactgatctaatagtggaaatctctttgcagccttggcaagcattcagaccagacggtgtcatcattttctctgacatcctcacccctttacctgcattcggtgtcccttttgatattgaagaggtaaaaggtcctgtaatccaatctcctatccgaactgaagaagatatgaagagattacatcccattgatttcgagaaactacagtttgttggagattctctcaagattttgagacgagaggttggggaacatgctgcggtgttgggtttcgttggagcgccttggacaattgcaacatatattgttgaaggaggaacaactcgaacatatacagtcataaagaatatgtgccacactgcaccagatgtattgagagctctattatctcatttaaccaaggccattaccgagtatgtggtttaccaagttgagcacggagctcactgcatacaaatattcgattcctggggtggccaactgactccggagatgtgggagcgctggtccaaaccatacattgaagagatcatacatgctgtaaagaaaagatgtccagatacgccgatagttttctacatcaatggaaatggtggccttcttgagcgaatgaaaggaactggagctgatgttattggacttgactggactgtagatatggctgatggaaggaggcgattgggaagcgaggtaagtgtgcagggaaatgttgatccagcttacctattctctccgcttcctgctttgaccgaagaaattgaaagagttgtgaagtgtgctggaccaaaagggcatattctcaatctaggacacggtgtcttggtagggacaccagaggaagccgtggctcatttctttgaaaccgctagaaacttggattaccaaacacttttccaaaatcatgttcctgcagaaaaagctgaacctgaattggttgtctga

SEQ ID NO: 374 - protein, 418 aa, Arabidopsis thaliana
MSLSSPTSACSSSRCYSSGLSFPIGFGSNPINVGLVCYPKRYSIAARKFVVACSSSSSDPLLVKAAKGQAISRPPAWMMRQAGRYMAVYQKLAKKHPSFRERSENTDLIVEISLQPWQAFRPDGVIIFSDILTPLPAFGVPFDIEEVKGPVIQSPIRTEEDMKRLHPIDFEKLQFVGDSLKILRREVGEHAAVLGFVGAPWTIATYIVEGGTTRTYTVIKNMCHTAPDVLRALLSHLTKAITEYVVYQVEHGAHCIQIFDSWGGQLTPEMWERWSKPYIEEIIHAVKKRCPDTPIVFYINGNGGLLERMKGTGADVIGLDWTVDMADGRRRLGSEVSVQGNVDPAYLFSPLPALTEEIERVVKCAGPKGHILNLGHGVLVGTPEEAVAHFFETARNLDYQTLFQNHVPAEKAEPELVV

SEQ ID NO: 375 - DNA, 1257 bp, Arabidopsis thaliana; identical to SEQ ID NO: 373

SEQ ID NO: 376 - protein, 418 aa, Arabidopsis thaliana; identical to SEQ ID NO: 374

SEQ ID NO: 377 - DNA, 798 bp, Aquilegia sp.
atgacttctttctgcgctttaaccagtaactgtgggtcgattggttggagttcttcaagcttgtttgaacagagtgggtttgtcttttctcaaggaattagaagtggggtttgttctgctagaagttttaagaaaaacaaaattcccaaagcgagtctttctacctctgacccactcttggtaaaggctgcacgaggagatgtggttagccggcctccagcatggatgatgcgtcaagcaggaaggtatatggctgtttacagaaaacttgcagagaaacacccatccttcagagagagatcagagacaactgatctcattgtggaaatctctttgcagccttggagagcttttcaacctgatggggttattattttctctgacattcttacccctctaccagcattcggtgtgccatttgacatagaagaagtaaggggtcccgttattcagtctccaatttcttccgaggagggattaaaagcattgcatcctattgacttagaaaaagtttcttttgttggggaatccttgcgaatactgcgccaagaggttggagaacaagcagcaattttgggttttgtaggagcaccatggacgattgccacatacatagtggaggggggtactacgcgtacatatacaactattaagagaatgtgccatactgcgccacatgtattgaaggctcttctctctcatctaacgcaggcgatatcagagtatgttatatttcaagtgaattctggagctcatgcatacagatctttgattcatggggtggacaattgccactga

SEQ ID NO: 378 - protein, 265 aa, Aquilegia sp.
MTSFCALTSNCGSIGWSSSSLFEQSGFVFSQGIRSGVCSARSFKKNKIPKASLSTSDPLLVKAARGDVVSRPPAWMMRQAGRYMAVYRKLAEKHPSFRERSETTDLIVEISLQPWRAFQPDGVIIFSDILTPLPAFGVPFDIEEVRGPVIQSPISSEEGLKALHPIDLEKVSFVGESLRILRQEVGEQAAILGFVGAPWTIATYIVEGGTTRTYTTIKRMCHTAPHVLKALLSHLTQAISEYVIFQVNSGAHAYRSLIHGVDNCH

SEQ ID NO: 379 - DNA, 1242 bp, Aquilegia sp.
atgacttctttctgcgctttaaccagtaactgtgggtcgattggttggagttcttcaagcttgtttgaacagagtgggtttgtcttttctcaaggaattagaagtggggtttgttctgctagaagttttaagaaaaacaaaattcccaaagcgagtctttctacctctgacccactcttggtaaaggctgcacgaggagatgtggttagccggcctccagcatggatgatgcgtcaagcaggaaggtatatggctgtttacagaaaacttgcagagaaacacccatccttcagagagagatcagagacaactgatctcattgtggaaatctctttgcagccttggagagcttttcaacctgatggggttattattttctctgacattcttacccctctaccagcattcggtgtgccatttgacatagaagaagtaaggggtcccgttattcagtctccaatttcttccgaggagggattaaaagcattgcatcctattgacttagaaaaagtttcttttgttggggaatccttgcgaatactgcgccaagaggttggagaacaagcagcaattttgggttttgtaggagcaccatggacgattgccacatacatagtggaggggggtactacgcgtacatatacaactattaagagaatgtgccatactgcgccacatgtattgaaggctcttctctctcatctaacgcaggcgatatcagagtatgttatatttcaagtgaattctggagctcaatgcatacagatctttgattcatggggtggacaattgccacctgatatgtgggagaaatggtcgaaaccttacattgaagagattgtgagtgcagtaaaaaagaagtgccctcaaataccactggtcctctacatcaatggcaatggcggctttcttgaacgcatgaaaggaactggggttgatgtgattggactagattggactgttgatatggcagatgggaggcggcgattaggaaatgatatcagtatccaaggaaacgtagacccagcttatctattctcaacacttcctgccttgactaatgaaattcaaagggttgtgaaatccgcagggcagaggggacacattcttaatctggggcatggggtgcttgttgggacacctgaggaagctgttgctcacttttttgatgtagcaagaagtttgaagtatgatacttattctgaagattgctcaagggaaaaatcagaagtagcagtttaa

SEQ ID NO: 380 - protein, 413 aa, Aquilegia sp.
MTSFCALTSNCGSIGWSSSSLFEQSGFVFSQGIRSGVCSARSFKKNKIPKASLSTSDPLLVKAARGDVVSRPPAWMMRQAGRYMAVYRKLAEKHPSFRERSETTDLIVEISLQPWRAFQPDGVIIFSDILTPLPAFGVPFDIEEVRGPVIQSPISSEEGLKALHPIDLEKVSFVGESLRILRQEVGEQAAILGFVGAPWTIATYIVEGGTTRTYTTIKRMCHTAPHVLKALLSHLTQAISEYVIFQVNSGAQCIQIFDSWGGQLPPDMWEKWSKPYIEEIVSAVKKKCPQIPLVLYINGNGGFLERMKGTGVDVIGLDWTVDMADGRRRLGNDISIQGNVDPAYLFSTLPALTNEIQRVVKSAGQRGHILNLGHGVLVGTPEEAVAHFFDVARSLKYDTYSEDCSREKSEVAV

SEQ ID NO: 381 - DNA, 1176 bp, Brassica napus
atgtcaatccttcagctctctagctcttctctttccttcctctctccgagaaaacctctgccgtcttcgtcttcgaagtcttcccggtcaattcgctcttccctcgagggaaccactgtaaccgagcggaaagtgtctgcaaccaccgagcctcttcttctgagagctgtcaaaggtgaagttgttgacagacctccggtttggctcatgaggcaagctgggaggtacatgaagagttatcaaactctatgtgagaagtatccttctttccgggatagatcagagaatgcagaccttgtggtggagatttctctccagccctggaaggtgttcaagccagatggggtgattttgttctcagacattctcactcctttgtctggaatgaacattcctttcgacattgtcaaaggcaaaggtccaatcatcttcaacccgccgcagtcagctgctgatgtgagtcaagtcagagagttcattccagaggagtctgttccgtatgttggagaagcactcaagaggttaagaaacgaggtgggcaatgaagctgcggttcttggttttgttggagctccattcactctctcctcctatgttattgaaggtggctcatctaagaacttcacacagatcaaaagattagctttctctcaacccaaggttctacatgctttactccagaagttcacaacctcaatgatcacttacatacgctaccaagcagatagtggagctcaagctgtgcaaatctttgattcatgggccactgagcttagccctgtggatttcgaggagtttagcttaccttacctcaaacagattgtggaagctgtgaaacagactcacccaaacctacctttgatactatatgcaagtggatcaggaggtttgctagagagactggctaggaccggtgtggatgttgtgagcttggactggactgtggacatggctgaaggaagggacaggctgggaagagacatagcggttcaaggaaacgtggaccctggagttttgtttggatccaaagagtttatcacaagcaggattgaagatactgtgaagaaagctgggagagataagcacattctgaacctggggcatggtattaaagttggaactcctgaagagaacgttgcacacttctttgaggttgctcaagggattagatattaa

SEQ ID NO: 382 - protein, 391 aa, Brassica napus
MSILQLSSSSLSFLSPRKPLPSSSSKSSRSIRSSLEGTTVTERKVSATTEPLLLRAVKGEVVDRPPVWLMRQAGRYMKSYQTLCEKYPSFRDRSENADLVVEISLQPWKVFKPDGVILFSDILTPLSGMNIPFDIVKGKGPIIFNPPQSAADVSQVREFIPEESVPYVGEALKRLRNEVGNEAAVLGFVGAPFTLSSYVIEGGSSKNFTQIKRLAFSQPKVLHALLQKFTTSMITYIRYQADSGAQAVQIFDSWATELSPVDFEEFSLPYLKQIVEAVKQTHPNLPLILYASGSGGLLERLARTGVDVVSLDWTVDMAEGRDRLGRDIAVQGNVDPGVLFGSKEFITSRIEDTVKKAGRDKHILNLGHGIKVGTPEENVAHFFEVAQGIRY

SEQ ID NO: 383 - DNA, 1254 bp, Brassica napus
atgagtttatcatcaccaaccagtgcttgcagctcgtcgagatgttactcctcgggcttatcattgccgatagggttccgatcaagtcccatcaatgtaggattggtttcttacccaagaagacacactaacgctcctcggaagctcgtcatagcttcctcctcctcctcctcctcctcagatcctttattggttaaagctgctaaaggggaagcagtgtctcgcccgccagcgtggatgatgaggcaagcaggaaggtacatgtccgtctacaaaaagctagccctgaagcacccttccttcagagagagatcagagaacactgatctcatcgtcgaaatctccttgcagccttggcaagcttttaaacccgacggtgtcatcatcttctccgacatcctcactcccttacccgccttcggagtccctttcgacatcgaagaagtcaaaggccccgtgatccagtcccccatcagaaccgaagatgatctcaagaacctgcatcccattgatcttgataagcttcagttcgttggagactctctcaagatactgagacgagaggttggaggggacgctgctgtgttgggtttcgttggagcgccgtggacgatagcgacttatatagttgaaggagggacgactcggacgtatacggtgatcaagagtatgtgtcacactgcacctaatgtactgagagctcttttgtctcatttgactaaggctattacggagtatgttgtgtaccaagttgagcacggagctcactgcatacagatatttgattcttggggtgggcagttgactcctgagatgtgggagcgctggtccaaaccttacattgaagagatcattgatgctgtgaagagaagatgtccagacacgccgatagttttctacatcaatggaaacggcggccttcttgagcggatgaaaggaaccggagctgatgttattggactagactggactgtagatatggctgatggaaggaggagacttgggagcgatgttagcgtgcaggggaatgttgatccagctttcctattctctccgcttcctgctttaactgaagaaattcaaagagttgtgaagagtgctggaccaaaagggcatatactcaacctaggacatggtgtcttggtagggacaccagaggaagccgtggctcatttctttgaaaccgcaaggagcttggattacaaaacgtttttccaaaaccatgttcctgcagaatctgaactggttgcctga

SEQ ID NO: 384 - protein, 417 aa, Brassica napus
MSLSSPTSACSSSRCYSSGLSLPIGFRSSPINVGLVSYPRRHTNAPRKLVIASSSSSSSSDPLLVKAAKGEAVSRPPAWMMRQAGRYMSVYKKLALKHPSFRERSENTDLIVEISLQPWQAFKPDGVIIFSDILTPLPAFGVPFDIEEVKGPVIQSPIRTEDDLKNLHPIDLDKLQFVGDSLKILRREVGGDAAVLGFVGAPWTIATYIVEGGTTRTYTVIKSMCHTAPNVLRALLSHLTKAITEYVVYQVEHGAHCIQIFDSWGGQLTPEMWERWSKPYIEEIIDAVKRRCPDTPIVFYINGNGGLLERMKGTGADVIGLDWTVDMADGRRRLGSDVSVQGNVDPAFLFSPLPALTEEIQRVVKSAGPKGHILNLGHGVLVGTPEEAVAHFFETARSLDYKTFFQNHVPAESELVA

SEQ ID NO: 385 - DNA, 609 bp, Brassica napus
atgagtttatcatcaccaaccagtgcttgcagctcgtcgagatgttactcctcgggcttatcgttgccaatagggttccgatcaagtcccatcaatgtaggattggtttctcacccaagaagacacactaactctcctcggaagctcgtcatagcttcctcctcatcctcagatcctttattggttaaagctgctaaggggcaaccagtgactcgtcctccagcttggatgatgaggcaagcaggaaggtacatgtccgtctacaagaagctagccctgaagcacccttccttcagagagagatcagagaacactgatctcattgtggagatctctctgcagccttggcaagcttttaaaccagacggtgtcatcatattctccgacatcctcactcccttacccgccttcggcgtccctttcgacatcgaggaagtcaaaggccctgtgatccagtcccccatcagaaccgaagatgatctcaagaagctgcatcctattgatcttgagaaagcttcagttcgttggagactctctgaagattctgagacgagaggtgggggaagcatgctgctgtgttgggtttcgttggagcgccgtggacgatag

SEQ ID NO: 386 - protein, 202 aa, Brassica napus
MSLSSPTSACSSSRCYSSGLSLPIGFRSSPINVGLVSHPRRHTNSPRKLVIASSSSSDPLLVKAAKGQPVTRPPAWMMRQAGRYMSVYKKLALKHPSFRERSENTDLIVEISLQPWQAFKPDGVIIFSDILTPLPAFGVPFDIEEVKGPVIQSPIRTEDDLKKLHPIDLEKASVRWRLSEDSETRGGGSMLLCWVSLERRGR

SEQ ID NO: 387 - DNA, 1173 bp, Chlamydomonas reinhardtii
atgcagaccaaggctttcacctctgcgcgcccccagcgggccgctgcgctcaaggcgcagcgcacctcgtcggtgaccgtgcgcgcgaccgcggcccccgccgtggcctctgcccccgccgcctcgggctctgcctctgaccccctgatgctgcgcgccatccgcggcgacaaggtggagcgcccgcccgtgtggatgatgcgccaggccggccgctaccagaaggtgtaccaggacctgtgcaagaagcaccccacgttccgtgagcgctcggagcgcgtggacctggcggtggagatctctctgcagccgtggcacgcgttcaagcccgacggcgtcatcctgttcagcgacattctgacccccctgcccggcatgaacatccccttcgacatggcgcccggccccatcatcatggaccccatccgcaccatggcgcaagtggagaaggtgacgaagctggacgctgaggccgcctgccccttcgtgggcgagtcgctgcgccagctgcgcacctacatcggcaaccaggccgcggtcctgggcttcgtgggcgcccccttcaccctggccacctacattgtggagggcggcagctccaagaacttcgcgcacatcaagaagatggctttctccacccccgagatcctgcacgccctgctggacaagctggctgacaacgtggccgactacgtccgctaccaggccgacgccggcgcccaggtggtgcagatcttcgactcgtgggccagcgagctgcagccccaggacttcgacgtgttctccggcccctacatcaagaaggtgatcgacagcgtgcgcaagacccaccccgacctgcccatcatcctctacatcagcggctctggcggcctgctggagcgcatggcctcttgctcgcccgacatcatctcgctggaccagtcggtggacttcaccgacggcgtcaagcgctgcggcaccaacttcgccttccagggcaacatggaccccggcgtcctgttcggctccaaggacttcatcgagaagcgcgtcatggacaccatcaaggctgcccgcgacgccgacgtgcgccacgtgatgaacctgggccacggcgtgctgcccggcacccccgaggaccacgtgggccactacttccacgtcgcccgcaccgcccacgagcgcatgtaa

SEQ ID NO: 388 - protein, 390 aa, Chlamydomonas reinhardtii
MQTKAFTSARPQRAAALKAQRTSSVTVRATAAPAVASAPAASGSASDPLMLRAIRGDKVERPPVWMMRQAGRYQKVYQDLCKKHPTFRERSERVDLAVEISLQPWHAFKPDGVILFSDILTPLPGMNIPFDMAPGPIIMDPIRTMAQVEKVTKLDAEAACPFVGESLRQLRTYIGNQAAVLGFVGAPFTLATYIVEGGSSKNFAHIKKMAFSTPEILHALLDKLADNVADYVRYQADAGAQVVQIFDSWASELQPQDFDVFSGPYIKKVIDSVRKTHPDLPIILYISGSGGLLERMASCSPDIISLDQSVDFTDGVKRCGTNFAFQGNMDPGVLFGSKDFIEKRVMDTIKAARDADVRHVMNLGHGVLPGTPEDHVGHYFHVARTAHERM

SEQ ID NO: 389 - DNA, 1185 bp, Chlamydomonas reinhardtii
atgtctcaaaccatgaacaagagcgtcggtgcttcccgcagcgcagtccttcgccgcaacgcgttcaagcccattgctgtgggcatgtcgcgtgctcctgcagtggtctccaacgcgcagcccgcgtcggcaggcatcgtggagccgctcatggtccgcgctgctcgtggcgagaaggttgagcgcgcgccttgctggatgatgcgccaggctggccgctaccagaagtcataccgcgagctcgcgaagaagcacccttccttccgcgagcgctcggagaccacggagctgatcgtggagatcagtctgcagccctggaactccttcaagcccgatggagtcatcctgttcagcgacatcctcacgccgctgccgggcatcggcgtgaacttcgatatcgatgacaacaagggacccataatcgatacgccaatccgcactctggagcaggtcaagcagctgcacgccatggacttcagcaaggtcgacttcgtgggccgcgctctgactcagctgcgctccgaggtgaacaaccaggcggcggtgctgggcttcgtgggctcgccctggacgctggccacctacctgattgagggcggctccaccagcctgtataagaccatcaagaccatgtgcttctccgcgcccgaggtgctggatgcactgctgagcaagctggccgacgccatggccgagtacatcaagtaccagatccgcgccggcgcgcagtgcgtacagatcttcgattcctggggtgggcagctgccgccgcgcgagtgggagaagtggtcgggcccctacctgaagcgcatcatcgccagcgtgaaggccgagtaccccaccgtgccgctcacgctgtacgcgaacggcagtggtggcctgctggagcgcctggccaccaccggcgccgacgtgatcggcgtggattggaccaccgacatggcggacgcgcgccgccggataccgagcacccagtcggtgcagggcaacgtggaccccgccatcctgttcgcctcgcacgacgccatcgaggacgccgtgcgcgactgcctgcgcaaggggggcggccagcgccacatcctcaacctgggccacggcgtgctggtgggcacccccgaggagggcgtggcgcacatgttcgacctctcgaagcgcctcacgtacgccgacgtcgcgcagcactga

SEQ ID NO: 390 - protein, 394 aa, Chlamydomonas reinhardtii
MSQTMNKSVGASRSAVLRRNAFKPIAVGMSRAPAVVSNAQPASAGIVEPLMVRAARGEKVERAPCWMMRQAGRYQKSYRELAKKHPSFRERSETTELIVEISLQPWNSFKPDGVILFSDILTPLPGIGVNFDIDDNKGPIIDTPIRTLEQVKQLHAMDFSKVDFVGRALTQLRSEVNNQAAVLGFVGSPWTLATYLIEGGSTSLYKTIKTMCFSAPEVLDALLSKLADAMAEYIKYQIRAGAQCVQIFDSWGGQLPPREWEKWSGPYLKRIIASVKAEYPTVPLTLYANGSGGLLERLATTGADVIGVDWTTDMADARRRIPSTQSVQGNVDPAILFASHDAIEDAVRDCLRKGGGQRHILNLGHGVLVGTPEEGVAHMFDLSKRLTYADVAQH

SEQ ID NO: 391 - DNA, 1197 bp, Chlamydomonas reinhardtii
atgcagagctccctgacccgccactctgcggcttctcgcgcaagtcagcccttccagcagggccgcgctgccccgcgtagccgcgcctgctcggttgcctgccgcgctgctgctggtcaagatccgctacttctgcgtgtggcgcgtggtgaagatgcggagcgcacgccggtctggctgatgcggcaagcgggccggtacatggccgccttccgggagtactctgacaagtaccccttccgcatgcgctccgagactcccgaaatcgccattgagctgtcgcttcagccactgcgtgctttccgccccgacggcatcatcttcttctctgatatcctcacgcccctgcctggcatgggcattgagtttgacatggtcaagggcaagggccccgtcattgccaaccccatgcgctccactgagcacctcaagcagctcacgccgctgtcggaccccgcctcccggctgccgttcatcaacaccatcctgtccactctacgcaaggaggctgacagcaacggtgtgacgctgctgggctttatcggcacgccctggaccctggctgcctactccatggagggcaaggccgacaaggactgcaaggagaccaagaaaatcatgttccacaaccccgcgctactgcactcgttcctggacttcctgaccgagcagctcatcgtgtacgccggctaccagattgagagcggcgcgcaggtgatccagctgttcgacagctgggcgcaccacctgtcgccggctcagtttacggagttctcgctgccctacatggagcgcattactgtggcgctcaaggccaagtatccgcacgtgccggtcatcatgcacgccaacggcggaacgggcaagctggagctgatgcgcgagtcggccgcggatgtcatcggtctggactgggcggtggacatgaaggacgcgcgccagcagctggcgggcaagcgggtgcagggcaacgtggaccccatgtcgctgttcggccccgaggaggtcatccgcgccgaggtggagcgctgcctgcgtgccgccgggccacgcggccacatcctcaacgtggggcacggcgttgtgcagggtacgcccgagtcgtccgtggcgctcttctgccagctggcgcgcgagtcgggggccattcacgcaaaggctgccgccaacggcgcccgccagcccgtgctggtgtag

SEQ ID NO: 392 - protein, 398 aa, Chlamydomonas reinhardtii
MQSSLTRHSAASRASQPFQQGRAAPRSRACSVACRAAAGQDPLLLRVARGEDAERTPVWLMRQAGRYMAAFREYSDKYPFRMRSETPEIAIELSLQPLRAFRPDGIIFFSDILTPLPGMGIEFDMVKGKGPVIANPMRSTEHLKQLTPLSDPASRLPFINTILSTLRKEADSNGVTLLGFIGTPWTLAAYSMEGKADKDCKETKKIMFHNPALLHSFLDFLTEQLIVYAGYQIESGAQVIQLFDSWAHHLSPAQFTEFSLPYMERITVALKAKYPHVPVIMHANGGTGKLELMRESAADVIGLDWAVDMKDARQQLAGKRVQGNVDPMSLFGPEEVIRAEVERCLRAAGPRGHILNVGHGVVQGTPESSVALFCQLARESGAIHAKAAANGARQPVLV

SEQ ID NO: 393 - DNA, 1161 bp, Citrus sinensis
atgtcctgctcttcaatttcggctatttcaaattttccactgtattcctcttctcactccaactcaaactcccgatatgtccgctgcgccgtcggagggactgtagcggaaccgaaaaatgtttctgttgccgaacccatgttgctgaaagctgttcgaggagaagatgttgaaagacctccagtttggcttatgaggcaagcagggaggtacatgaagagttatcaaatcatctgcgagaagtatccttcatttcgtgaaagatcagaaaatgttgatcttgttgtggaaatttctcttcagccgtggcatgtttttaagccagatggtgtcattttattctcagacattttaactcctctttctgggatgaatataccttttgacattatcaagggtaagggtcctgtcatatttgatcctataaacacagatgcagaagttgaccaagtgagagaatttgatcctgaggagtcagttccatatgttgggaaagcattgacaatcttgcgagaagaggtaaacaatgaagcagcagttctgggttttgttggggctcctttcaccctggcgtcatatgtggttgagggtggttcatcgaagcacttcagcaaaataaagcgactagctttctctcaacccaaggtcctccatgcattgcttcggaaatttacaacctctatggcaaagtatgtacaataccaagctgacaatggagctcaagcagttcaaatcttcgattcatgggccacggagctcagtcctgttgattttgaagagtttagtctgccttacttgaagcaaattgtagacactgtgaaacaaacacatcctgatctctcattaatcctttatgccagtggatctggtggcttgcttgagaggctagctttgacaggtgtggatgttgttagcttggactggacagttgacatggctgaaggtagacggcgacttgggcccgacgttgcagttcaaggaaatgtcgatcctggtgcccttttcggttccaaggacttcatcaccaaccggataaatgataccgtgaggaaagcaggtagatggaaacatattttaaatcttggtcacggcattaaagtaggtacacctgaggaaaatgttgctcatttcttcgaagttgctaaagcaattagatactag

SEQ ID NO: 394 - protein, 386 aa, Citrus sinensis
MSCSSISAISNFPLYSSSHSNSNSRYVRCAVGGTVAEPKNVSVAEPMLLKAVRGEDVERPPVWLMRQAGRYMKSYQIICEKYPSFRERSENVDLVVEISLQPWHVFKPDGVILFSDILTPLSGMNIPFDIIKGKGPVIFDPINTDAEVDQVREFDPEESVPYVGKALTILREEVNNEAAVLGFVGAPFTLASYVVEGGSSKHFSKIKRLAFSQPKVLHALLRKFTTSMAKYVQYQADNGAQAVQIFDSWATELSPVDFEEFSLPYLKQIVDTVKQTHPDLSLILYASGSGGLLERLALTGVDVVSLDWTVDMAEGRRRLGPDVAVQGNVDPGALFGSKDFITNRINDTVRKAGRWKHILNLGHGIKVGTPEENVAHFFEVAKAIRY

SEQ ID NO: 395 - DNA, 1242 bp, Chlorella vulgaris
atgcagacacagttgcatgcccagtttcagggcataacaagcacatttacgacgagaagaccgtcatgttgccacacatcaagacgtctgaacgcccacaacatcgtgcgttgttcggcagaggatcctttgctactaagggtggctaggggagaagatgcagaaaggacacctgtctggctgatgaggcaagcaggcagatacatggcggaatttaggaagtactcagaccgcttgcccttcagggaaaggtctgagaacgcagagatagccacagagctatcgctgcagccctggagggctttccagccagacggggtcatcatgttcagcgacatcctgaccccactccctgtgctgggcatagaattcgacattgtgaggggcaagggaccagccatctccattcccatcagaaccatggagcaagtgagggcgctgcggccgatggaggacccagacagcagcctgcccttcatcaggcagatcctcacaaacctgcgctcggaggtgggcaatgcctccacagtgctcggctttgtcggcgccccttggaccctggcagcctactccatggagggcaccttccaaaagcagtgcatggccacgaagaagatcatgacagcgcagcctgctgtgctgcacgcgcttctggaccacctgactgaggccctcatagtctatgtctgccatcagattgacagcggggcacaggtggtgcaactatttgactcctgggcaggcctgctgtcgccagcgcagtttgcagagttcagcctgccctatgcgcagcgcgtgatcgatggtgtgcgcgcccagcggccggacacacccctcatcttccacgccaatggaggcacggggaagctggacaaggtggcgcagtgcagcgcggatgtgattggcctggactggcacacagacatggccgacgcgcgccggcagctgggcgcagggcgtgtgctgcagggcaacatggaccccatgctgctgtttgctccacaggacgttctgcggagagaggtgaccaaggtgctgcacgccgcgggccccaggaagcacatcctgaacgtagggcatggagtggctcagggaactcccgaggagaacgtgggtctcttctgcgagctggcacggcagtctgccagcattcatgcccaagcagagatctccctcacagacgaggacatgcaggctttgaataggctggggcaaagtgaagttggccttgtggggtgctga

SEQ ID NO: 396 - protein, 413 aa, Chlorella vulgaris
MQTQLHAQFQGITSTFTTRRPSCCHTSRRLNAHNIVRCSAEDPLLLRVARGEDAERTPVWLMRQAGRYMAEFRKYSDRLPFRERSENAEIATELSLQPWRAFQPDGVIMFSDILTPLPVLGIEFDIVRGKGPAISIPIRTMEQVRALRPMEDPDSSLPFIRQILTNLRSEVGNASTVLGFVGAPWTLAAYSMEGTFQKQCMATKKIMTAQPAVLHALLDHLTEALIVYVCHQIDSGAQVVQLFDSWAGLLSPAQFAEFSLPYAQRVIDGVRAQRPDTPLIFHANGGTGKLDKVAQCSADVIGLDWHTDMADARRQLGAGRVLQGNMDPMLLFAPQDVLRREVTKVLHAAGPRKHILNVGHGVAQGTPEENVGLFCELARQSASIHAQAEISLTDEDMQALNRLGQSEVGLVGC

SEQ ID NO: 397 - DNA, 1077 bp, Chlorella vulgaris
atggatggccaagattcttggaaggcccaaagcggcacacaggagcccctgctgctgcaagccttgaatggagtaccagtgcacaggccgcctgtgtggatgatgcgccaggcaggccgctacatgaaggtgtaccaggacctgtgcaagaagcaccccaccttcagggaacgatcagagaacacagaccttgcggtggaggtgtccctgcagccttggagggccttcaagccggacggagtcatcctgttctcggacatcctgacccccctcacgggcatgaacatcccctttgacatcgacactggcaggggacccatcatccacgaccccatccgcaccatggagcaagtgaaccaggtgacgaggttagaggccgaggaggcaacgccctacgtcggggaggcgctgcgggcgctacgggccgaggtcggcaacgaggctgcagtgctcgggtttgtgggcgcgccgttcacgctggcgtcgtacatagtggagggaggctccagcaagaactacacccacatcaagcgcctggcattcacgcagccggccgtgctgcatgcgctgctcagcaagctggccgacaacgtggccgactacatccgctaccaggcggatgcaggggcacaggtggtgcagatctttgactcgtgggcttcgcagctttcgcctcaggactttgaggtcttctccgctccctacatcaagcagatcatcgccgacgtgcgcaagacgcacccgcagctgaagctgatcctgtacatcagcggcagcgggggcctgctggagcgcatggctgcctgccagccggacatcatgtccatcgatcagcacgtcgacctccgcgatgccatcgcgcgcatcggcccagacttcgccgtccagggcaacatggaccccggcgtgctgttcggctccagggatgtgattgagcagcggatactggacaccgtgcgcgccgcgcagggcacccgccacgtcatgaacctgggccacggtgtccttgtgggaacgcctgaagactccgtcgcacacttcttcgaggtggcacgcaccgtgcacgagcggttgtga

SEQ ID NO: 398 - protein, 358 aa, Chlorella vulgaris
MDGQDSWKAQSGTQEPLLLQALNGVPVHRPPVWMMRQAGRYMKVYQDLCKKHPTFRERSENTDLAVEVSLQPWRAFKPDGVILFSDILTPLTGMNIPFDIDTGRGPIIHDPIRTMEQVNQVTRLEAEEATPYVGEALRALRAEVGNEAAVLGFVGAPFTLASYIVEGGSSKNYTHIKRLAFTQPAVLHALLSKLADNVADYIRYQADAGAQVVQIFDSWASQLSPQDFEVFSAPYIKQIIADVRKTHPQLKLILYISGSGGLLERMAACQPDIMSIDQHVDLRDAIARIGPDFAVQGNMDPGVLFGSRDVIEQRILDTVRAAQGTRHVMNLGHGVLVGTPEDSVAHFFEVARTVHERL

SEQ ID NO: 399 - DNA, 927 bp, Chlorella vulgaris
atgatgcgtcaggccggtagatatcaacttaccctgtctgagcggacggacctgattgttgagatcagtctacagccttggcattcctttcggccagatggtgtcatcctgttcagcgatatcctgacacctcttgcagccctgggcgtgccctttgaaattgatgatcacaagggtcccatcatagagaatcctataagcacgattgagcaggtgaaccagttgcatgatttggacttggaacgcttgcactttgtgggtgaatcattgactctcctgcgacaagaaacacagggtcaggctgcagtgttggggtttgtgggcagcccatggaccctggcaacgtacatcatagaggggaagagctccatccactataagaccatcaaaacgatgctgtacaaggcgccagaggtacttgatgcactcttgagccacttggcagatcagatcgccacctacattggattccagatcagctctggggcccacgctgtgcagctctttgactcctggggcggccagctaccacctcacctttgggacaggtggtcgcggccgtacattgagcgcatcgtgcagagagtgaaggcagagcatcccagcgtgcccatcacactgtatgccaatggcagtggagggctgctggagcgtctgggcagcactggtgtggacgtggtgggcctggactggaccatagacatggctgatgccaggaggcggctgggccctgatgtctcagtgcagggcaatgtggatccagcggtgttgtttgcgtctgaggatgccatagaggcggcagtcaaggactgcattgcaaaggcggggcagaaggggcacatcttgaatcttggccatggagttcttgtgggcacgccggaggagagcgtggcacacatgttcaacctgtccaagtccttggtataa

SEQ ID NO: 400 - protein, 308 aa, Chlorella vulgaris
MMRQAGRYQLTLSERTDLIVEISLQPWHSFRPDGVILFSDILTPLAALGVPFEIDDHKGPIIENPISTIEQVNQLHDLDLERLHFVGESLTLLRQETQGQAAVLGFVGSPWTLATYIIEGKSSIHYKTIKTMLYKAPEVLDALLSHLADQIATYIGFQISSGAHAVQLFDSWGGQLPPHLWDRWSRPYIERIVQRVKAEHPSVPITLYANGSGGLLERLGSTGVDVVGLDWTIDMADARRRLGPDVSVQGNVDPAVLFASEDAIEAAVKDCIAKAGQKGHILNLGHGVLVGTPEESVAHMFNLSKSLV

SEQ ID NO: 401 - DNA, 1191 bp, Chlorella sp.
atgcaggcagcaatgttcagccaggccgccacggccgccttcaagcccgctctgaagaccagggcggcgcgccggaacgcggtgcaggtgcatgctgtggcctcggtggagcagtctgcgggcgcagcagccaaggcgtctggggaggagccgctgctgctgcgggcgctgcggggcgaggaggtggagcgcccgccggtgtggatgatgcgccaggccgggcggtacatgaaggtgtaccaggagctgtgcaagaagcacaccaccttccgcgagcgctcggagaacgccgacatcgccgtggaggtgtcgctgcagccgtggcgcgcgttccagcccgacggcgtcatcctcttctccgacatcctcacccccatcgccggcatgaacatcccctttgacatcgacaagggcaagggccccgtcatcgcagaccccatccgcaccatggaggctgtggacagggtcaccccgctggtgcctgaggactgcgtgccgtttgtgggccaggcgctgcgccgcctgcgcgccgaggtcggcggcgcgtccaccgtgctgggctttgtcggcgcccccttcaccctggcaacatacattgtggagggcggcatgagcaagaactatgtgcagatcaagaagctgatgttcacggagcccgaggtgctgcacgcgctgctgcagaagctggccgacgcggtggtcacctacattaagtaccagcacgacaacggcgcgcaggtggtgcagatcttcgactcctgggcggcgcagctgagcccccaggactttgacatttggtgcgggccctacatcaagtacatcatcgccgaggccaagaagcaatgccccgacctgcccatcatcctctacatttccaacagcggggccctggtggagcgcatggcggcatgcaacccagacatcatctccctctgccacacggtggacatgaaggagggcatccgccgcgcgggcacccagtttgcctaccagggcaacatggacagcggcgtgctgtttggcagccacgacatgattgagcagcgggtgcgggagacggccaaggcggccaaggagatgggcgtgcggcacatcatgaacctgggccacggcatcatgcagggcaccccggaggagaatgcggcccacttcttcaaggttgccaaggagctgcgctatgccgacctctga

SEQ ID NO: 402 - protein, 396 aa, Chlorella sp.
MQAAMFSQAATAAFKPALKTRAARRNAVQVHAVASVEQSAGAAAKASGEEPLLLRALRGEEVERPPVWMMRQAGRYMKVYQELCKKHTTFRERSENADIAVEVSLQPWRAFQPDGVILFSDILTPIAGMNIPFDIDKGKGPVIADPIRTMEAVDRVTPLVPEDCVPFVGQALRRLRAEVGGASTVLGFVGAPFTLATYIVEGGMSKNYVQIKKLMFTEPEVLHALLQKLADAVVTYIKYQHDNGAQVVQIFDSWAAQLSPQDFDIWCGPYIKYIIAEAKKQCPDLPIILYISNSGALVERMAACNPDIISLCHTVDMKEGIRRAGTQFAYQGNMDSGVLFGSHDMIEQRVRETAKAAKEMGVRHIMNLGHGIMQGTPEENAAHFFKVAKELRYADL

SEQ ID NO: 403 - DNA, 1044 bp, Chlorella sp.
atggtgcgtgctgctcgcggcgaggccattgagcgggcgccatgctggatgatgcggcaggcggggcggtaccagaaggcgtaccgtgaccttgccctcaagcacccctccttccgcgagcgctccgagaacacagacctgattgtggagatcagcctgcagccctggcagtcgttcacgccggatggcgtcatcatcttcagcgacatcctgacgccgctgcccgcctttggcatcccgtttgagattgacgacaacaaggggccgctgctggacaaccccatccgcagcacggagcagctcaagcagctgcacgccatcgacctgcagcagctgagctttgtgggggagagcctggggctgatccgccaggaggtggcggggcgggccgctgtgctgggctttgtgggctgcccctggacgctggccacgtacgtggtggagggcgcctcctcctccatctacaaaaacatcaagaccatgatgttcaacgagccgcagctgctggactccctgctgagccacatcgccgaccagattgccgagtacgtgaagttccagattgacagcggcgccgactgcatcatgatgtttgactcgtggggcggccagctgccgcccaagcagtgggaccgctggtcgcgcccctacgtcgagcgcatcgtgcggcaggtgaaggccacgcacccgcgcacgccgctcacgctgtacgccaacggcagcggcggcatgctggagcgcatggggcagacgggcgcggacgtcatcgggctggactggacggtggacatggcagacgcgcggcggcggctgggcgcaggcgtggcggtgcagggcaatgtggacccggtggttctatttgggtctgaggctgccattgaggaggcggtgcgcgactgcctgaccaaggcgggcgagggcggccacatcctcaacctgggccacggcgtgctggtgggcaccccggaggagtcggtggccttcatgtttgacctctcgaagaagctcacttacagctccaacaagacgcccgccgcagtctga

SEQ ID NO: 404 - protein, 347 aa, Chlorella sp.
MVRAARGEAIERAPCWMMRQAGRYQKAYRDLALKHPSFRERSENTDLIVEISLQPWQSFTPDGVIIFSDILTPLPAFGIPFEIDDNKGPLLDNPIRSTEQLKQLHAIDLQQLSFVGESLGLIRQEVAGRAAVLGFVGCPWTLATYVVEGASSSIYKNIKTMMFNEPQLLDSLLSHIADQIAEYVKFQIDSGADCIMMFDSWGGQLPPKQWDRWSRPYVERIVRQVKATHPRTPLTLYANGSGGMLERMGQTGADVIGLDWTVDMADARRRLGAGVAVQGNVDPVVLFGSEAAIEEAVRDCLTKAGEGGHILNLGHGVLVGTPEESVAFMFDLSKKLTYSSNKTPAAV

SEQ ID NO: 405 - DNA, 792 bp, Euphorbia esula
atgaatctctcgttcgatattgttaaaggcaagggccccgttatattcaatcccctacgaacttctgacgatgttaagcaagttagggaattcattcccgaggagtctgttccatatgttggagaatcattgacaatcctgaggaaagaggtagataatcaagcggctgtacttggtttcgttggggcaccgttcactctagcatcatattgtgtagaaggaggttcatcgaaacacttctcgaaaataaaaaaattagctttctccgaaccccaggtcctacacgcattgctccaaaaattcgctacctccatggcaaaatacgtccaatatcaagccgataaaggcgctcaagccgtccaaatcttcgactcgtgggccacggaacttagtccggttgattttgaggagttcagtcttccatacctaaaacaaattgtggataccgtgaaagtaacccatccgaatctccctttaatcctttatgcaagcgggtccgggggattgcttgagaggctagctttgactggtgtagatgtggttagcttggattggaccgttgacatggcggaaggtaggaggcgattgggacccgatttggcggttcaggggaatgtagatccgggcgttcttttcgggtcgaaagagtttatcactaatcggattaatgatgttgtccgaaaagccgggaaagggaagcatatattgaaccttggtcatggaattgttgtaggcacaccagaggaaaatgttgctcatttttttgaggttgctaaagcaattagatactag

SEQ ID NO: 406 - protein, 263 aa, Euphorbia esula
MNLSFDIVKGKGPVIFNPLRTSDDVKQVREFIPEESVPYVGESLTILRKEVDNQAAVLGFVGAPFTLASYCVEGGSSKHFSKIKKLAFSEPQVLHALLQKFATSMAKYVQYQADKGAQAVQIFDSWATELSPVDFEEFSLPYLKQIVDTVKVTHPNLPLILYASGSGGLLERLALTGVDVVSLDWTVDMAEGRRRLGPDLAVQGNVDPGVLFGSKEFITNRINDVVRKAGKGKHILNLGHGIVVGTPEENVAHFFEVAKAIRY

SEQ ID NO: 407 - DNA, 1170 bp, Emiliania huxleyi
atgctcctcgccaccgctgccaccgcgctcagcgtgcgcatgtcggccgcgcccgcgccggcgagcgcctctgcctcctcgacttcgggcgccgccgacgcgccgctgctgctgcgagcggcgcgaggcgaggtcaccgagtcgacgccagtgtggatgatgcggcaggcgggcaggcacatgcaggtgtaccgcgacctggtgaaggactacccgacgtttcgcgagcgctccgagattcccgacgtctcgtatgccgtctcgatgcagccgcgcgacgcctatggcaccgacggagtgattttgttctccgacatcctcacgcctctgcctgcaatgggcgtcgactttgcgatctccgagggcggagggatcacgatcgacccgatccgcacgcgcgaggccttcgccaagatgaccgccgtccccttcgagcccgagacgaagatcagctttgtcggcgacgtgctcaagcggctgcgcgcgacgttggccggcaccgacgcgacggtgctcgggttcgtcggcctcccgttcacgctgggcacgtacctcatcgagggcgccaccggcacgaagacaggcttcgccgcgatgaggcagctccgagagtccgacccgcaactcgtggccgacatgctcaagctgctcggcgaccggatcgcgcagtacgcaatctaccagatcgactctggcgcgcaggtggtccaagtcttcgactcgtgggcgggccacctcacgccggacgagtttgacgagtgggcggcccccttccagcggcaagtcgttggcgccatcaaggctgcgcggcccgatacgcccgtaatcatctacatggcccccgacacccactccaaggagggggcgcttatcaccaagctcgcggcctcgggcgcaaacgtcgtctcggtcgaccacaccctcccgatctccgcggcgcgcgagctgctcgacgaggccggctacgagtcggtcggcttgcagggcaacctcgaccccgccatcctcgccgaggggtcggaggaggagatcgtcgccgccgcgcaggacatcctcaagaagatggctggtcggccgcacatcatgaacctcggccacggcatcgagccgaccacccccgagccgtcggccaacctctttgtcaagacggtccaggagtggcgcaactga

SEQ ID NO: 408 - protein, 389 aa, Emiliania huxleyi
MLLATAATALSVRMSAAPAPASASASSTSGAADAPLLLRAARGEVTESTPVWMMRQAGRHMQVYRDLVKDYPTFRERSEIPDVSYAVSMQPRDAYGTDGVILFSDILTPLPAMGVDFAISEGGGITIDPIRTREAFAKMTAVPFEPETKISFVGDVLKRLRATLAGTDATVLGFVGLPFTLGTYLIEGATGTKTGFAAMRQLRESDPQLVADMLKLLGDRIAQYAIYQIDSGAQVVQVFDSWAGHLTPDEFDEWAAPFQRQVVGAIKAARPDTPVIIYMAPDTHSKEGALITKLAASGANVVSVDHTLPISAARELLDEAGYESVGLQGNLDPAILAEGSEEEIVAAAQDILKKMAGRPHIMNLGHGIEPTTPEPSANLFVKTVQEWRN

SEQ ID NO: 409 - DNA, 1230 bp, Emiliania huxleyi
atgcacctcttggcgatcccgtgcttcgctcctggcgtctcgctcgcccctggcgtgcagcacggcgccgcggccggcgccgcgagccgcgccggcgcgccggtgctgcaggcgaccgagctgcgcatcgagaccccgccgggcggcgcggccgagctgctgcgtgcggctccgaactggacgccggcgccgggcgagcacgacatcctgctccgcgcggcgcgcggcgaggcggtggagcgcacgccggtgtggctcatgcggcaggcgggccgctacatggccgccttccgcgagtactccacaaagtaccccttccgtatgcggagcgagacgcccgaggtcgccatcgagctgtcgctgcagccgtggcgcgcgttcggcgtggacggcgtggtgatgttttcggacatactgacgccgctgcccgccatgggcgtcgatttcgacgtcgtccgcggcaccggccccgtcatcccgcagccgctccgcaccgccgccgacgtcgccgcgctgacgccgatcgacgactttgaatcgaagctcggcttcatccgcacgatcctgggctcgctgcgcaaggagacggagggcgggtgcacgctcatcggctttgtcggctcgcccttcaccctcgtcgcctacgccgtcgagggccaggccaaccgccactgcatctcgacgaaacagatgatgacggccgcgcccgaggtgctgcacgccgcgctcgaccacttcgccaccgagattggaaagtacggctgccaccagatcgagtgcggcgctcagaccatccagttcttcgagtcgtgggcgcaccacctcggagccggccagtttgacaccttcgccaagccgtacgcagacaaggcgatgcgatacatcaaggagcgccacccggacgtgccgatcatctactatgccaacggcgggtcgccgtacctcgagctgcagcgcgacatggcggcggacatgatccagctcgattggggcaccgacatggccaccgcgaggcgccgcctcgggacggagcgccgcgtggccggcaacgtcgacccgactgtcctgtttggctcggaggcgcagatcacggcggcggtgcaccaaaacatacgcgacgcgggcggcaaggggcagcacctcctcaacctcggccacggagtgctgcagggcacgcccgaggcgtccgtggcggcgtttgtcaacgccgcaaagtcgttctcggagtga

SEQ ID NO: 410 - protein, 409 aa, Emiliania huxleyi
MHLLAIPCFAPGVSLAPGVQHGAAAGAASRAGAPVLQATELRIETPPGGAAELLRAAPNWTPAPGEHDILLRAARGEAVERTPVWLMRQAGRYMAAFREYSTKYPFRMRSETPEVAIELSLQPWRAFGVDGVVMFSDILTPLPAMGVDFDVVRGTGPVIPQPLRTAADVAALTPIDDFESKLGFIRTILGSLRKETEGGCTLIGFVGSPFTLVAYAVEGQANRHCISTKQMMTAAPEVLHAALDHFATEIGKYGCHQIECGAQTIQFFESWAHHLGAGQFDTFAKPYADKAMRYIKERHPDVPIIYYANGGSPYLELQRDMAADMIQLDWGTDMATARRRLGTERRVAGNVDPTVLFGSEAQITAAVHQNIRDAGGKGQHLLNLGHGVLQGTPEASVAAFVNAAKSFSE

SEQ ID NO: 411 - DNA, 1164 bp, Gossypium hirsutum
atgtcttgtacctcagtttcttcttttactgcttctctctttgtcccttcaaaaagttcatctttttccaatcataagcgcagattcatccaatgttctcttggtggggctgtagtagaaccaaaagctttagcagaacccctgttgctcaatgctgttcgagggcaagatgttgaaagaccaccagtttggcttatgaggcaagcagggaggtacatgaagagctatcaaataatatgtgaaaaatatccttcctttcgtgaaagatcggaaaatgttgatcttgtcgttgagatttccctgcagccatggaatgttttcaagccagatggggtcattttattctccgatattctcactcctctctcagggatgaacatacctttcgacattatcaagggtaaaggtccagttatctttgaccctatagccactgctgctgatgttgatcaagtgagagaatttagtcccgaggggtcagttccatatgttggtgaagcattgacaatcttgaagaaagaggtagataacaaagctgcagtattgggttttgttggcgctccattcactctagcatcatatgtggttgaaggtggttcatcgaagaacttcacaaaaataaaaaaattggccttctctcaacccaaggtacttcattctttgcttcagaaatttgcgacctccatgacaaagtatattcggtaccaagctgacaatggagcccaagctgttcaaatatttgactcttgggcaacggagctaagtccggtggattttgaggagttcagcctgccgtatttgaagcaaattgtagatgctgtaaaacaaacccatccggatcttcctctaatcctttatgcaagtggatctgggggcttgcttgaaaggctagctttaacaggtgtggatgtagttagcttagattggactgttgacatggctgaaggtagaagacgacttggacacgatattgctgtccagggaaacgttgatcctggagttctgttcggttcaaaggacttcatcaccaatcggatacatgatactgtgacaaaagctggtaaagggaaacatatattgaatctcggtcatgggattaaagtaggtacccctgaagaaaatgttgcccatttctttgaggttgctaaagcaatcaggtactaa

SEQ ID NO: 412 - protein, 387 aa, Gossypium hirsutum
MSCTSVSSFTASLFVPSKSSSFSNHKRRFIQCSLGGAVVEPKALAEPLLLNAVRGQDVERPPVWLMRQAGRYMKSYQIICEKYPSFRERSENVDLVVEISLQPWNVFKPDGVILFSDILTPLSGMNIPFDIIKGKGPVIFDPIATAADVDQVREFSPEGSVPYVGEALTILKKEVDNKAAVLGFVGAPFTLASYVVEGGSSKNFTKIKKLAFSQPKVLHSLLQKFATSMTKYIRYQADNGAQAVQIFDSWATELSPVDFEEFSLPYLKQIVDAVKQTHPDLPLILYASGSGGLLERLALTGVDVVSLDWTVDMAEGRRRLGHDIAVQGNVDPGVLFGSKDFITNRIHDTVTKAGKGKHILNLGHGIKVGTPEENVAHFFEVAKAIRY

SEQ ID NO: 413 - DNA, 1164 bp, Glycine max
atgctttgcgtcaacactgccttcacctctttcttacccagaaaatcaacttgcgtcttttcctccaaatcaaccaccccaatttcctgcaccctccaaggaacagttgcagagccaaaatctacagctgctgctgaaccgcttttgctaaatgcagttcgcgggatagatgttgaaagacccccggtttggctcatgaggcaagcagggaggtacatgaagagttaccaaaccatctgtgagaaatatccttcattccgtgaaagatctgaaaatgttgatctcgtggtggaaatttctctgcaaccgtggcatgttttcaagcctgatggagtgattttattctcagacattcttaccccactttctggaatgaatataccctttgatattgtgaagggtaagggtcctgttatatttgatcctattcacacatctgcccaggttgatcaagtgaaggagtttattcctgaagaatcagttccatatgttggtgaagcactgacaattttgaggaaagaggtggataataaagctgcagtccttggttttgtcggggcaccgttcactctggcatcatatgtggttgaaggtggttcatcaaaaaacttctcaaaaataaagagattggctttctcagaatccaagatcctgcactcgttactgcagaagtttacaacatcaatggcaagatacattcaataccaagctgacaatggagctcaagctgttcagatctttgattcatgggcaacagaactcagtccagtggattttgaagaattcagtttgccttacttgaagcagatcattgatactgtgaagaaaagtcatccagacctccctttgatcctctatgcaagtgggtctgggggcttgcttgaaagactagctttgacaggtgtggatgtagttagcttggattggacggttgatatggctgacggtaggaggcgactgggaccgaatatagctgtccaggggaacgtcgaccctggtgttctttttggttcaaaagagttcatcactgatcggataactgatactgtgagaaaagcaggtagagggaaacatatcttgaatcttggacatggcattaaagtaggtacgcctgaggagaatgttgcacatttttttgaggttgctaaatcaatcagatactaa

SEQ ID NO: 414 - protein, 387 aa, Glycine max
MLCVNTAFTSFLPRKSTCVFSSKSTTPISCTLQGTVAEPKSTAAAEPLLLNAVRGIDVERPPVWLMRQAGRYMKSYQTICEKYPSFRERSENVDLVVEISLQPWHVFKPDGVILFSDILTPLSGMNIPFDIVKGKGPVIFDPIHTSAQVDQVKEFIPEESVPYVGEALTILRKEVDNKAAVLGFVGAPFTLASYVVEGGSSKNFSKIKRLAFSESKILHSLLQKFTTSMARYIQYQADNGAQAVQIFDSWATELSPVDFEEFSLPYLKQIIDTVKKSHPDLPLILYASGSGGLLERLALTGVDVVSLDWTVDMADGRRRLGPNIAVQGNVDPGVLFGSKEFITDRITDTVRKAGRGKHILNLGHGIKVGTPEENVAHFFEVAKSIRY

SEQ ID NO: 415 - DNA, 1230 bp, Glycine max
atggctacttccattaacagtgctctggggtggaaacattcctccttgttcgtacaatctaataatggctttaacgtggcttcgcctcctttcaaacataaaccgccacgctcctccaagttttctctcacttgctctgccgcttcctcttcttctgatccactattggttaaggctgctaggggggatcctgttagtcgtcctccggcatggatgatgcgccaggccggaaggtacatggctgtttacaaaaagcttgctgagaaatatccatccttccgagagaggtcagagacaactgatctcattgtggaaatttctttgcagccttggaatgctttcaggcctgatggagtaattatcttctcggacatccttacaccacttcctgcgtttggagttgattttgacatagaagaagtaaggggacctgttatacattcgcccattcgttctgaggaaggattaaaggttttacatccaattgacctggacaggcttaaatttgttggagattcactaaagatactgcgccaagaggttggtggtcatgcagctgttttgggttttgtgggagcaccttggacaatagcaacatatatagtggaagggggtacaacacgcacatatacaaccattaagagcatgtgccacactgccccacatgtattgaggactttgctttctcatttgacgcaggcaatagctgattacgttattttccaagtggagtctggggctcattgcatacaaatatttgattcatggggtggacaactaccacctgaaatgtgggaacgctggtcaaagccttatatcaaagagattgtaaatttggtcaagaaaaaatgccctggggtaccaattgttctttatataaacggaaatggtggtcttcttgagcgtatgaaagacaccggagttgatgttatagggctagactggacagtggatatggcagatggaagaagaagattgggtagtgggataggtgttcagggaaatgtggaccctgcctacttattctcccctcttgatgccctgactgaagaaattcagagggttgtgaggtgtgcgggacctagacggcatatccttaatctcggacatggtgttcttgttggcacacctgaagaagctgttgcacatttctttgaagtagctaggagcttgcagtttgacacactttttcaaaacaatactgcaaaaggccctaatcttgtaacttaa

SEQ ID NO: 416 - protein, 409 aa, Glycine max
MATSINSALGWKHSSLFVQSNNGFNVASPPFKHKPPRSSKFSLTCSAASSSSDPLLVKAARGDPVSRPPAWMMRQAGRYMAVYKKLAEKYPSFRERSETTDLIVEISLQPWNAFRPDGVIIFSDILTPLPAFGVDFDIEEVRGPVIHSPIRSEEGLKVLHPIDLDRLKFVGDSLKILRQEVGGHAAVLGFVGAPWTIATYIVEGGTTRTYTTIKSMCHTAPHVLRTLLSHLTQAIADYVIFQVESGAHCIQIFDSWGGQLPPEMWERWSKPYIKEIVNLVKKKCPGVPIVLYINGNGGLLERMKDTGVDVIGLDWTVDMADGRRRLGSGIGVQGNVDPAYLFSPLDALTEEIQRVVRCAGPRRHILNLGHGVLVGTPEEAVAHFFEVARSLQFDTLFQNNTAKGPNLVT

SEQ ID NO: 417 - DNA, 927 bp, Glycine max
atggatgatgcgccaggcaggaagccttggaaagctttcagaccagatggagtcattatcttctcagacatccttacaccacttcctgcatttggagttgattttgacatagaagaagtaaggggacctgttatacattcacccattcattctgaggaaggattaaaggttttgcatccaattgacctggacaggcttaaatttgttggagattcacttaagatactgcgccgagaggttggtggtcatgcagctgttttgggttttgtgggagctccttggacaatagcaacatatatagtggaagggggtacaacacgcacatatacaaccattaagagcatgtgtcacactgctccacatgtattgaggactttgctttctcatttgacacaagcaatagctgattatgctattttccaagtggagtctggggctcactgcatacaaatatttgattcatggggtggacaactaccacctgaaatgtgggaatgctggtcaaagtcatatatcaaagagattgtaaatttggtcaagaaaaaatgccctgaggtaccaattgttctttatataaatggaaatggtggtcttcttgagcgtatgaaagacactggagttgatgttatagggctagactggacagtggatatggcagatggaagaagaagattgggtagtgggataagtgttcagggaaatgtggaccctgcctacttgttctctcctcttgatgccctgactgaagaaattcagagggttgtgaggtgtgcgggacctagacggcacatccttaatctcggacatggtgttcttgttggcacgcctgaagaagctgttgcacatttctttgaagtagctaggagcttgcagtttgaaacactttttcaaaacaataccgcaaaagaccctaatcttgtaacttaa

SEQ ID NO: 418 - protein, 308 aa, Glycine max
MDDAPGRKPWKAFRPDGVIIFSDILTPLPAFGVDFDIEEVRGPVIHSPIHSEEGLKVLHPIDLDRLKFVGDSLKILRREVGGHAAVLGFVGAPWTIATYIVEGGTTRTYTTIKSMCHTAPHVLRTLLSHLTQAIADYAIFQVESGAHCIQIFDSWGGQLPPEMWECWSKSYIKEIVNLVKKKCPEVPIVLYINGNGGLLERMKDTGVDVIGLDWTVDMADGRRRLGSGISVQGNVDPAYLFSPLDALTEEIQRVVRCAGPRRHILNLGHGVLVGTPEEAVAHFFEVARSLQFETLFQNNTAKDPNLVT

SEQ ID NO: 419 - DNA, 1164 bp, Glycine max
atgctttgcgtcaacactgccttcacctctttcttgcccagaaaatcaatttgcttcttttcctccaaatcaaccaccccaatttcctgcaccctccaaggaacagttgcagaaccaaaatctacagctgctggtgaacctcttttgctaaatgcagttcgtgggatagatgttgaaagacccccggtttggctcatgaggcaagcagggaggtacatgaagagttaccaaaccatctgtgagaaatatccttcattccgtgaaagatctgaaaatgttgatctcgtggtggaaatttctctgcaaccatggcatgtttttaagcccgatggagtgattttattctcagacattcttaccccactttctggaatgaatataccctttgatattgtgaagggtaagggtcctgttatatttgatcctattcacacagctgcccaggttgatcaagtgagggagtttattcctgaagaatcagttccatatgttggtgaagcactgacaattttgaggaaagaggtggataataaagctgcagtccttggttttgttggggcaccattcaccctggcatcatatgtggttgaaggtggttcatcaaaaaacttctcaaaaataaagagattggctttctctgaatccaagatcctgcactcattactgcagaagtttacaacatcaatggccagatacattcaataccaagctgacaatggagctcaagctgttcagatctttgattcatgggcaacagaacttagtccagtggattttgaagaattcagtttgccttacttgaagcagattattgatactgtgaagaaaagtcatccaaacctccctttgatcctctatgcaagtgggtctgggggtttgcttgaaagactagctttgacaggcgtggatgtagttagcttggattggacggttgatatggctgatggtaggaggcgactgggaccgaatatagctgtccaggggaacgtggaccctggcgttctttttggttcaaaagagttcatcactgatcggataaatgatactgtgagaaaagcaggtagagggaaacatatcttgaatcttggacatggcattaaagtaggtacgcctgaggagaatgttgcacatttttttgaggttgctaaatcaatcagatactaa

SEQ ID NO: 420 - protein, 387 aa, Glycine max
MLCVNTAFTSFLPRKSICFFSSKSTTPISCTLQGTVAEPKSTAAGEPLLLNAVRGIDVERPPVWLMRQAGRYMKSYQTICEKYPSFRERSENVDLVVEISLQPWHVFKPDGVILFSDILTPLSGMNIPFDIVKGKGPVIFDPIHTAAQVDQVREFIPEESVPYVGEALTILRKEVDNKAAVLGFVGAPFTLASYVVEGGSSKNFSKIKRLAFSESKILHSLLQKFTTSMARYIQYQADNGAQAVQIFDSWATELSPVDFEEFSLPYLKQIIDTVKKSHPNLPLILYASGSGGLLERLALTGVDVVSLDWTVDMADGRRRLGPNIAVQGNVDPGVLFGSKEFITDRINDTVRKAGRGKHILNLGHGIKVGTPEENVAHFFEVAKSIRY

SEQ ID NO: 421 - DNA, 1212 bp, Hordeum vulgare
atgatgtccccgacgactaccgctacggctacggccacggccgccgccttcctctccgcggctcctgcctcctcgtcctccacccaccgccggcgtagccgtctccctgctatctccgcctccctcccgtccgaagaaccgctgctcatacgtgcggcgaggggcgaggacgggctgcccaggccgccggcgtggatgatgcggcaggctgggcggtacatggcgtcgtaccaggcgctgtccaagcgccacccttcgttccgggagcggtcggagaccaccgacctcatcgtcgaaatcacgctacagccctggcacgccttcgcacccgacggcgtcatcctattctcggacatactcacgccgctgccggccatcggggtgccgtttgatatctcggaatccaaggggccggtgatccagtcgcctgtgcggacggaggaacaggtcagggagctcgttcccatagatctcgataagctccagttcgttggggagtcgctcaagattctgcgcagcgagattgatggaaaagctgctttgctaggattcgtgggggccccatggacaattgcaacttatgttgttgaaggagggatgaccaacacttacacaaatataaagcgcatgtgccacacagcaccaaatgtcttgaggggccttctctctcacctcgcagaagctatatctgactatatcatttaccaagtaaactctggtgctcagtgtatacagatatttgattcttggggtgggcaacttccacctcatgtgtgggagcaatggtcaaaaccatacatcagacagattgtggctaagattaagacagaatgccctcacataccactcgtactgtatataaatggaaatggaggcttgcttgagcgcatgaaggacataggagttgatgttattgggcttgactggacagtggatatggcagatggaaggaggcgcattggtgatggaattagtgtacaagggaatgtggacccagcatatctattttcaccattaccagtattgactgatgaaatccatagggttgtgaaatcagctggcccgaaaggtcatatacttaacttgggccatggtgttcttcagcaaacaccagaagaagccgtagcacatttctttgatgtcacaaggagcttgagatatgacacccttttccagggtcaacttactgaagaattgcaacctgttgcttga

SEQ ID NO: 422 - protein, 403 aa, Hordeum vulgare
MMSPTTTATATATAAAFLSAAPASSSSTHRRRSRLPAISASLPSEEPLLIRAARGEDGLPRPPAWMMRQAGRYMASYQALSKRHPSFRERSETTDLIVEITLQPWHAFAPDGVILFSDILTPLPAIGVPFDISESKGPVIQSPVRTEEQVRELVPIDLDKLQFVGESLKILRSEIDGKAALLGFVGAPWTIATYVVEGGMTNTYTNIKRMCHTAPNVLRGLLSHLAEAISDYIIYQVNSGAQCIQIFDSWGGQLPPHVWEQWSKPYIRQIVAKIKTECPHIPLVLYINGNGGLLERMKDIGVDVIGLDWTVDMADGRRRIGDGISVQGNVDPAYLFSPLPVLTDEIHRVVKSAGPKGHILNLGHGVLQQTPEEAVAHFFDVTRSLRYDTLFQGQLTEELQPVA

SEQ ID NO: 423 - DNA, 759 bp, Lactuca serriola
atgtcaattatgtacagttttccttcattctcctcgatctccgtttccaattttacttatcgtcgtccaaatcgtatcatctgctccgccggagcacctgttgcagaacgaaaagctgtgaatacaactgaaccacttttacttaatgctgttcgtggtgaagatgtagaaagacccccagtttggcttatgagacaagcagggaggtacatgaagagttatcaaaccttatgtgagaagcatccttccttccgtgaaagatcagagaatgtagatcttgttgtggagatttctctacagccatggaaggtcttcaagcctgatggagttattttgttttcagacattcttacacctctaccaggaatgaacataccctttgacatcgttaaaggaaagggtcccatcatattcgatccaatcagcacagccgctcaggttgaccaagtcagagaattcacccccgaagagtgggtcccatatgttggggaggccttaacaattttaagaaaagaggtaaataacgaagcagcagttcttggttttgttggagctcctttcaccctcgcatcatatgtggttgaaggcggatcatcgaaaaacttttccaaaataaagactctcgctttctcacagcctaaggtacttcacgcgttgcttgagaaattcacaacatcaatggctaaatacattaagtaccaagcagaacaacggggcccaagcgggttcaaatattcgactcatgggcaaccgaactga

SEQ ID NO: 424 - protein, 252 aa, Lactuca serriola
MSIMYSFPSFSSISVSNFTYRRPNRIICSAGAPVAERKAVNTTEPLLLNAVRGEDVERPPVWLMRQAGRYMKSYQTLCEKHPSFRERSENVDLVVEISLQPWKVFKPDGVILFSDILTPLPGMNIPFDIVKGKGPIIFDPISTAAQVDQVREFTPEEWVPYVGEALTILRKEVNNEAAVLGFVGAPFTLASYVVEGGSSKNFSKIKTLAFSQPKVLHALLEKFTTSMAKYIKYQAEQRGPSGFKYSTHGQPN

SEQ ID NO: 425 - DNA, 762 bp, Lactuca virosa
atgtcaattatgtacagttgttcggttccttcattctcctcgatctcggtttccaattttacttatcgtcgcccaaatcgtatcatctgctccgccggagcacctgttgcagaacgaaaagctgtaaatacaactgaaccacttttacttaatgctgttcgtggtgaagatgttgatagacccccagtttggcttatgagacaagcagggaggtacatgaagagttatcaaaccttatgtgagaagcatccttccttccgtgaaagatcagagaatgtagatcttgttgtggagatttctctacagccatggaaggtctttaagcctgatggagttattttattttcagacattcttacacctctaccaggaatgaacataccctttgacatcgttaaaggaaagggtcccatcatattcgatccaatcagcacagccgctcaggttgaccaagtcagggaattcacccccgaagagtgggtcccatatgttggggaagccttgacaattttaagaaaagaggtaaataacgaagcagcagttcttggttttgttggagctcctttcacccttgcatcatatgtggttgaaggcggatcatccaaaaacttttccaaaataaagactctcgctttctcacagcctaaggtacttcacgcgttgcttgagaaattcacaacatcaatggctaaatacattaagtaccaagcagaaaacggggcccaagcggttcaatattcgactcatgggcaaccgaactga

SEQ ID NO: 426 - protein, 253 aa, Lactuca virosa
MSIMYSCSVPSFSSISVSNFTYRRPNRIICSAGAPVAERKAVNTTEPLLLNAVRGEDVDRPPVWLMRQAGRYMKSYQTLCEKHPSFRERSENVDLVVEISLQPWKVFKPDGVILFSDILTPLPGMNIPFDIVKGKGPIIFDPISTAAQVDQVREFTPEEWVPYVGEALTILRKEVNNEAAVLGFVGAPFTLASYVVEGGSSKNFSKIKTLAFSQPKVLHALLEKFTTSMAKYIKYQAENGAQAVQYSTHGQPN

SEQ ID NO: 427 - DNA, 1191 bp, Malus domestica
atgcatccaatcatgtcttgcattcacagctacggctccatagcttccatctctctccccacctccccttccttcactccaagatccagatgcgtccccaggtctcgcttcctctgcgccgtcggaggaagtgtggcagaagcccaagttgcgtccattgctgagccccttttgctcaatgcagttcgtggggacgatgttgagagacccccagtttggctcatgaggcaagcagggaggtacatgaagagttatcaaactctctgcgagaggtacccttcgtttcgagaaagatccgaaaatgttgacctcgttgttgaaatttcgctacagccctggaaggtcttcaagcctgatggagtcattttgttctcggatattttaactcctctttctgggatgaatataccatttgacattgtaaaaggtaagggtcctgtaatatttgatcctctgcaaactgccgatgatgttgttcaagtaagagaatttgttccacaagaatcagttccatatgttggggaagcgttgacaatcttgcgaaaagaggtagataataaggcagcagtgctaggttttgtcggggctcctttcaccctagcatcatatgttgtggaaggtggttcatcaaagcatttctcaaagataaagagattagccttctctcaaccaaaggtcctccatgcattacttcaaaaattcacaacttcgatgacaaaatatattcgataccaagctgataatggagctcaagccgttcagatctttgactcatgggccacagaactcagccctgtggattttgaggaattcagcctgccatacttgaagcaaatcgtggatgctgtgaaagagacccatccagatctccctttaatcctttacgcaagcggatccgggggtttgctcgagaggctagctctgacaggtgttgatgtagttagcttggactggactgttgatatggcggaaggtagaaggcgactgggaccaaatatagcagttcaaggtaatgtggatcctggtgttctcttcggttcaaaagaattcatcaccagcagaataaacgatacagtgaggaaagccggtagagggaaacatattttgaatcttggccacggcattgtagtaggtacaccccaggagaacgttgctcatttctttgaggtcgctaaagatatcagatactga

SEQ ID NO: 428 - protein, 396 aa, Malus domestica
MHPIMSCIHSYGSIASISLPTSPSFTPRSRCVPRSRFLCAVGGSVAEAQVASIAEPLLLNAVRGDDVERPPVWLMRQAGRYMKSYQTLCERYPSFRERSENVDLVVEISLQPWKVFKPDGVILFSDILTPLSGMNIPFDIVKGKGPVIFDPLQTADDVVQVREFVPQESVPYVGEALTILRKEVDNKAAVLGFVGAPFTLASYVVEGGSSKHFSKIKRLAFSQPKVLHALLQKFTTSMTKYIRYQADNGAQAVQIFDSWATELSPVDFEEFSLPYLKQIVDAVKETHPDLPLILYASGSGGLLERLALTGVDVVSLDWTVDMAEGRRRLGPNIAVQGNVDPGVLFGSKEFITSRINDTVRKAGRGKHILNLGHGIVVGTPQENVAHFFEVAKDIRY

SEQ ID NO: 429 - DNA, 1224 bp, Medicago truncatula
atggaaaccattcctacttccatcaacagtggtttaggatggaaatcttcccccttatttcaacaatccaattgcttcaaccttctttcttctccattcaaaccaaaaccctctctcaccaagtttacactcacttgctctgccgcttcatcttcttcttctgatcctctcttggttaaggctgcgagaggagatcctgttagccgtcctccggcatggatgatgcgccaagcaggaaggtacatggctatttacagaaagttagctgagaaacatccatccttcagagagaggtcagagacgactgatctcattgtagaaatttctttgcagccttggaaagctttcaggcctgatggagtaattattttctccgacatcctaacacctctacctgcgtttgggattgactttgacatagaagatgtgaggggacctgtaatacagtcaccgatacgctctgaggagggattaaaggttttgcacccaattgacttcgacaagcttagatttgtaggagaatcacttaagatcctgcagcaagaggttggtggtgatgccgctgttttaggttttgtgggagcaccttggacattggcaacatatatagtggaagggggtacaacgcgcacatatacaaatattaagagcatgtgccatacagcaccacacatactacggactctgctttctcatttgtcaaaggcaatagcagattacatcgttttccaagtggaatctggggctcactgcatacaaatatttgattcatggggtggacaactgccacctcatatgtgggaactctggtcaaagccttatatcaaagagattgtaaatttggtcaagaaaaagtgcccagacacaccacttgttctttatataaatggaaatggcggccttctcgagcgtatggtagacactggagttgatgttattggacttgactggacagtggatatggctgatgggagaagaagattaggtagcgggataggtgtgcaaggaaatgtggaccctgcttccttattctctcctcttacttccctaacagaagaaattcagagggttgtgaggtctgcaggacctagacaacacatccttaatcttgggcatggtgttcttgttggcacacctgaagaagctgtagcacatttctttgacgtcgcgaggagcttgaagtttgacacagtctctcaaaacaacactgcaaatgtagcttaa

SEQ ID NO: 430 - protein, 407 aa, Medicago truncatula
METIPTSINSGLGWKSSPLFQQSNCFNLLSSPFKPKPSLTKFTLTCSAASSSSSDPLLVKAARGDPVSRPPAWMMRQAGRYMAIYRKLAEKHPSFRERSETTDLIVEISLQPWKAFRPDGVIIFSDILTPLPAFGIDFDIEDVRGPVIQSPIRSEEGLKVLHPIDFDKLRFVGESLKILQQEVGGDAAVLGFVGAPWTLATYIVEGGTTRTYTNIKSMCHTAPHILRTLLSHLSKAIADYIVFQVESGAHCIQIFDSWGGQLPPHMWELWSKPYIKEIVNLVKKKCPDTPLVLYINGNGGLLERMVDTGVDVIGLDWTVDMADGRRRLGSGIGVQGNVDPASLFSPLTSLTEEIQRVVRSAGPRQHILNLGHGVLVGTPEEAVAHFFDVARSLKFDTVSQNNTANVA

SEQ ID NO: 431 - DNA, 1170 bp, Medicago truncatula
atgttttgcggcgtagttagcacttccttcacttccattttacccagaaaacaacaccactccacacccttttccccattcaaatccattcaatgttctcttccaggagctgttgctgaacctaaaacaaataatgccacagaacctcttttgctcaatgcagttcgtggattagatgtcgaaagacctcctgtttggcttatgaggcaagctgggaggtacatgaagagttaccaaatcatctgcgaaaaatatccgtcattccgggaaagatctgaaaatgttgatctcgtggttgaaatttcattgcaaccgtggaaggttttccagcctgatggggtgatattattctcagacattcttacacccctatctggaatgaatattccatttgacattgtaaaaggcaagggtcctgtcatatttgacccagttcactccgcaggccaagttgatcaagtgagggagtttattcccgaggaatcagttccatacgttggtgaagcactatcaattttgcgcaaagaggtagataataaatctgcagtccttggttttgtgggtgctccgtttaccctggcgtcgtatgtggttgaaggcggttcatcaaaacatttctctaaaataaagagattggcattctctgaaccaaagatccttcactcattactgcaaaagtttacaacatcaatggcaagatacatacaataccaagctgacaatggagcgcaagctgtgcagatattcgattcatgggcaacggagcttagtccagtggattttgaacgattcagtttgccatacttgaagcaaattatcgacactgtaaagaaaagccatccagaactccctcttatcctctatgcaagtggatcaggaggcttacttgagagaatagcattgaccggtgtggatgttgttagcttggattggacagtcgatatggctgacggtagaaggagattaggaccaaatgtagctatccaaggtaatgttgatcctggtgttctgtttggatcgaaagagctgattacagataggatacacgatactgtgagaaaggctggtagagggaaacatatcctaaaccttggtcacggcattgtagtaggtactcctgaggagaatgtagcacatttttttgaggttgccaaaggaatcaaatactaa

SEQ ID NO: 432 - protein, 389 aa, Medicago truncatula
MFCGVVSTSFTSILPRKQHHSTPFSPFKSIQCSLPGAVAEPKTNNATEPLLLNAVRGLDVERPPVWLMRQAGRYMKSYQIICEKYPSFRERSENVDLVVEISLQPWKVFQPDGVILFSDILTPLSGMNIPFDIVKGKGPVIFDPVHSAGQVDQVREFIPEESVPYVGEALSILRKEVDNKSAVLGFVGAPFTLASYVVEGGSSKHFSKIKRLAFSEPKILHSLLQKFTTSMARYIQYQADNGAQAVQIFDSWATELSPVDFERFSLPYLKQIIDTVKKSHPELPLILYASGSGGLLERIALTGVDVVSLDWTVDMADGRRRLGPNVAIQGNVDPGVLFGSKELITDRIHDTVRKAGRGKHILNLGHGIVVGTPEENVAHFFEVAKGIKY

SEQ ID NO: 433 - DNA, 1176 bp, Nicotiana tabacum
atgatgtcttgtaattactctttctcttctatatctccttcctctaaatctgcttttacttctccctctaactttaatctcaaccccagattaatctgttgctctgctggaggaactgttgcggaaccaaaagctataaatgcaacacaaccattgttgcttgatgctgtacggggtaaagaagtagaaagacctcccgtttggcttatgagacaagcagggaggtatatgaagagctatcaactcctctgcgagaagtacccattgttccgtgatagatcagagaacgttgatcttgtggtagaaatttctctacaaccctggaaagtattcaggcctgatggggtcattttattttcagacattcttactcctctttcagggatgaatatccctttcgacattataaaggggaagggtcctgtcatatttgatcccctgagaacagctgctgatgttgagaaagttagagaattcattcctgaaaaatcagttccatatgttggagaagcattaacaattttgcggaaagaggtcaataatcaagcagcagttcttggtttcgttggggcaccttttaccctggcgtcatatgtggttgaaggtggttcctctaagaacttcacaaagataaagagattagcttttgcagagcccaaggtcctgcatgctctccttcaaaaatttgcgacctctatggctaaatatatccgttaccaagcagacagtggagctcaagcagttcagatctttgattcatgggctactgagctaagcccagtcgattttgaagagtttagtctgccttatttaaaacagatagtggattcagtgaaactaacccatcctaacctcccactgattctttacgcaagtggatctggtggcttgcttgagagacttcccttgacaggtgtggatgtagtaagcttggattggacagttgatatggctgatggaaggagacgactgggccctaatgttgccatacaaggtaatgtggatcctggtgtcctttttggctcaaaagaatttatcaccaatcgaataaatgataccgtcaagaaagctggtaaagggaaacatattttgaaccttggacatggcatcaaggtaggcaccccggaggaaaatgttgctcacttttttgagattgctaaaggacttaggtattag

SEQ ID NO: 434 - protein, 391 aa, Nicotiana tabacum
MMSCNYSFSSISPSSKSAFTSPSNFNLNPRLICCSAGGTVAEPKAINATQPLLLDAVRGKEVERPPVWLMRQAGRYMKSYQLLCEKYPLFRDRSENVDLVVEISLQPWKVFRPDGVILFSDILTPLSGMNIPFDIIKGKGPVIFDPLRTAADVEKVREFIPEKSVPYVGEALTILRKEVNNQAAVLGFVGAPFTLASYVVEGGSSKNFTKIKRLAFAEPKVLHALLQKFATSMAKYIRYQADSGAQAVQIFDSWATELSPVDFEEFSLPYLKQIVDSVKLTHPNLPLILYASGSGGLLERLPLTGVDVVSLDWTVDMADGRRRLGPNVAIQGNVDPGVLFGSKEFITNRINDTVKKAGKGKHILNLGHGIKVGTPEENVAHFFEIAKGLRY

SEQ ID NO: 435 - DNA, 1164 bp, Ocimum basilicum
atgaattgcatttacagcacctcagtttcatcgatttccactaaattgaatcttccccctcaatttaatcacaaagccaaattcttctgctctcttggaggagctgttgcagagccaaaagctgtaaatgtgacggagcctttgttgcttaatgccgcacgaggaaaagacgtagagaggccaccagtttggcttatgagacaagcagggaggtacatgaagagttaccaaatcctctgtgagaagtatccgtcgttccgcgaaagatcggaaaatgtagatcttgtggtggaaatctctcttcaaccgtggaatgtttttaaacctgacggggtgatcttattctctgatattcttacaccgttgactggtatgaatataccttttgacattgtgaaaggtaagggtcctatcatatttgatccaatacgctctgctgccgatgttgaaaaggtgggggaattcactcctaatgagtcagtcccatatgttggagaagctttgtcgatattgcgcaaggaggtaaacaacgaagccgcagttctaggtttcgtcggggcaccattcaccctggcttcttacgtcgttgaaggaggttcctcaaagcacttctcaaagattaaaagattggcattctcagagcctaaggtccttcacgccctacttcaaaagtttgcgacctccatggccaagtacatccagtaccaagccgacaagggggctcaagctgttcagattttcgactcgtgggccacagagctcagccccgtggatttcgaagagttcagtcttccttacctgaaacaaatcgtggacactgtgaggcgcacccatccgagcctcccgctgatcctgtatgcaagtgggtcaggtgggctgatcgagaggctgcctttgacgggtgtggacgtggttagcttggattggacggtggacatggcggaaggtagacgacgacttgggcctaatgtggccgtgcaaggtaatgtggacccgggggtcctgttcgggtcaaaagagttcatcacggagagaataaaggacaccgttaggaaagctgggaaggggaaacacatattgaatcttgggcatgggattgtggtgggtaccccggaggaaaatgttgctcatttttttgaggttgccaagggccttagatattag

SEQ ID NO: 436 - protein, 387 aa, Ocimum basilicum
MNCIYSTSVSSISTKLNLPPQFNHKAKFFCSLGGAVAEPKAVNVTEPLLLNAARGKDVERPPVWLMRQAGRYMKSYQILCEKYPSFRERSENVDLVVEISLQPWNVFKPDGVILFSDILTPLTGMNIPFDIVKGKGPIIFDPIRSAADVEKVGEFTPNESVPYVGEALSILRKEVNNEAAVLGFVGAPFTLASYVVEGGSSKHFSKIKRLAFSEPKVLHALLQKFATSMAKYIQYQADKGAQAVQIFDSWATELSPVDFEEFSLPYLKQIVDTVRRTHPSLPLILYASGSGGLIERLPLTGVDVVSLDWTVDMAEGRRRLGPNVAVQGNVDPGVLFGSKEFITERIKDTVRKAGKGKHILNLGHGIVVGTPEENVAHFFEVAKGLRY

SEQ ID NO: 437 - DNA, 1173 bp, Oryza glaberrima
atggcgaccgcgtgcccgccgctctcgctgcagccggcctacctctcggggaggtccgcgcgcgcccgccgcccgccgcccgccgtccgctgcagcgccgtcggagaggttatggcggagacggcggcggtcgggacggcggaggagccgctgctggtgagcgcgatcaaggggaggaaggtcgagagaccgccggtctggctcatgaggcaggccgggaggtacatgaagagctatcaattgctctgcgagcgacatccttcattccgtgaaagatcagaaaatgttgaccttgttgttgagatctctctacaaccatggaaggttttcaagcccgatggagttatcctgttctcagatatccttacaccgcttcctgggatgaacataccttttgacattgtgaaaggaaaaggtccagtgatatttgatcccttgagaacagcagctgctgtgaatgaggtcagagaatttgttccagaggagtgggtcccatatgttgggcaggctttaaacattttgcgggaagaggttaacaatgaagctgccgtgttgggctttgttggagctccctttacattggcatcctattgtgtggaaggaggttcatcaaagaacttttcaaagattaagaaaatggccttctcagaaccagagattctgcataatttgctacagaaatttactacgtccatggctaactacattaaataccaagctgacaacggagcacaagctgtccaaatttttgactcatgggctacagaactcagcccagttgattttgaggagtttagcttgccttatctgaagcagattgtggatagtgtcaaagaaacacatcctgaattgcctctgatactatatgcaagtggatctggtggactgctggagaggcttccactgacaggtgttgatgttgttagcttggactggacggttgatatggctgaggggaggaaaagattgggatctaacatagcggttcaagggaatgttgaccctggcgttctttttgggtcaaaagagttcataagcaagcggatttttgacactgtgcagaaagctggtaatagtgggcatgtattgaaccttggtcatggcattaaggtaggcactcctgaggaaaatgttgcccatttctttgaggttgcaaaagggatcagatactga

SEQ ID NO: 438 - protein, 390 aa, Oryza glaberrima
MATACPPLSLQPAYLSGRSARARRPPPAVRCSAVGEVMAETAAVGTAEEPLLVSAIKGRKVERPPVWLMRQAGRYMKSYQLLCERHPSFRERSENVDLVVEISLQPWKVFKPDGVILFSDILTPLPGMNIPFDIVKGKGPVIFDPLRTAAAVNEVREFVPEEWVPYVGQALNILREEVNNEAAVLGFVGAPFTLASYCVEGGSSKNFSKIKKMAFSEPEILHNLLQKFTTSMANYIKYQADNGAQAVQIFDSWATELSPVDFEEFSLPYLKQIVDSVKETHPELPLILYASGSGGLLERLPLTGVDVVSLDWTVDMAEGRKRLGSNIAVQGNVDPGVLFGSKEFISKRIFDTVQKAGNSGHVLNLGHGIKVGTPEENVAHFFEVAKGIRY

SEQ ID NO: 439 - DNA, 1020 bp, Ostreococcus lucimarinus
atgctgcgcgcgatccgaggcgaagacgtcgagcgaccgccgatctggatgatgcgacaggcggggagatacatgaaggtgtatcaagacttgtgcaaaaagcacacgacgtttcgagagcgaagcgagacggtggatctcgcggtagagatctcgctgcagccgtacgaggcgtttaaacccgatggggtgattttgttcagcgatattctcacgccgttgcaagggatgaacattccgttcgacatcgtaaagggaacggggccgatcatcttcaacccggtgcgcgagatggacgatatcaagagcatcacgccgttggagccggagaagagcgtgccgttcgtcggggagtcgttgaaggtgttgagaaatgaaattgggaacgaggcgacgctgctcgggttttgtggagcgccgtttacgttggcgtcttacatcgtcgagggcgggacgagctcgcactacaaggtgattaagaaaatggcgttcgattcgccagcggtgtacgaggcgctcatgaataagctcacggacgccgtgatcgagtacacgcggtaccaagcggactctggggcgcaagtggtgcaaattttcgactcgtgggcaagcgagttttcgcccgcggatttcgaagtgtactgcctgccgtacctccaacgcatcgtcgccgagtgcaagcaaacccacccacacgtgccgctcatcctttacagctctggaagtgccggtttcttggagcgcttagcgacgacgaacgcggatgttatcagcttagacgggacgattgacatggcggacgcgcgcgctcgactcggtatggatcaggcggtgcaagggaacatggatccgctccacctctttgcgtcgcaagatttcatcacgaaaaaggtgcacgaaacgatcgccaaggctggaaacaagaagcacgtcatgaatctcggtcacggggtcatggtcggcaccccagaggaaaacgttggacacttcttcaagaccgttcgagacttccggtattaa

SEQ ID NO: 440 - protein, 339 aa, Ostreococcus lucimarinus
MLRAIRGEDVERPPIWMMRQAGRYMKVYQDLCKKHTTFRERSETVDLAVEISLQPYEAFKPDGVILFSDILTPLQGMNIPFDIVKGTGPIIFNPVREMDDIKSITPLEPEKSVPFVGESLKVLRNEIGNEATLLGFCGAPFTLASYIVEGGTSSHYKVIKKMAFDSPAVYEALMNKLTDAVIEYTRYQADSGAQVVQIFDSWASEFSPADFEVYCLPYLQRIVAECKQTHPHVPLILYSSGSAGFLERLATTNADVISLDGTIDMADARARLGMDQAVQGNMDPLHLFASQDFITKKVHETIAKAGNKKHVMNLGHGVMVGTPEENVGHFFKTVRDFRY

SEQ ID NO: 441 - DNA, 966 bp, Ostreococcus lucimarinus
atgatgcgacaagcgggacggtacatgaaggagtaccgggacgtggcggtgaaacatccgagctttcgcgagcgaagcgagacgacggatctgatctgcgagatcacgctgcaaccgtttcgcgcgtttcaaccggatggggtgattctgttcagcgacatcttgaccccgtttccggcgttcgggatcgatttcgagattgacgattacaagggaccgatgttggagaagacgattcgaagcgcggaggatttgaagatgttgcacgaagttgatttgagtaaggttgagttcgtggcggattcgttgaagattttgcgacaagaggttggtgatgaagcggccgtgctcggtttcgtcggcgcgccgtggacgctgtgcacgtacatcgtcgaagggcaatcgacgtcgacgtacaaaaccatcaagtcgatgtgcttcaacaatcccgaggtgttgcacaagttgctgagcgccgtggcggacgcgttggcggtgtacgtcggattccaaatcgatgccggcgcgcaagtgattcaagtgttcgactcttggggtggacaattgccgccgcacatgtgggaggaatggagcaagccgtacatcgagcgcgtcgttcgcaaggtgaaccagacgcacccgggagtgccgattactatgtacgccaacggttcgggcggtcttttggagcgcatggcgacgttgccggtggacaccatcgggctggattggacgatcgatatggaggatggtcgacgccgcgtcggggacaaggcggtgcaaggtaacgtcgatcccgtcgtcctcttcgccggagaagacgcgatcgaaaaggctgtcagagacgtgtgccgcaaggcgggtccgaccggtcacatcctcaacctcggtcacggcgtgctcgtgggcacgcctgaggaatcggtcaagcacttcttcgacgtttctaagacgatcacgtactag

SEQ ID NO: 442 - protein, 321 aa, Ostreococcus lucimarinus
MMRQAGRYMKEYRDVAVKHPSFRERSETTDLICEITLQPFRAFQPDGVILFSDILTPFPAFGIDFEIDDYKGPMLEKTIRSAEDLKMLHEVDLSKVEFVADSLKILRQEVGDEAAVLGFVGAPWTLCTYIVEGQSTSTYKTIKSMCFNNPEVLHKLLSAVADALAVYVGFQIDAGAQVIQVFDSWGGQLPPHMWEEWSKPYIERVVRKVNQTHPGVPITMYANGSGGLLERMATLPVDTIGLDWTIDMEDGRRRVGDKAVQGNVDPVVLFAGEDAIEKAVRDVCRKAGPTGHILNLGHGVLVGTPEESVKHFFDVSKTITY

SEQ ID NO: 443 - DNA, 1185 bp, Ostreococcus lucimarinus
atgcacgggttgacgatcggcgcgacgcgcgcgatgacgctggcgaagagggacgtcgtcggaaagagcgacgcgcgaggacgaaggatgcgaacgcgaaggacgacgacgacgacggcggcggcgggagggaaccaagatccgatcttgcttcgcgcggcgcgaggggaagacgtggaacgaccgccggtgtggctgatgcgtcaggcggggaggtacatggcggagtttcgcgcgtacagtaccaagtacgggttcaggcaccgaagcgagacgccggagatcgccatcgagctgtcgatgcaaccgtggcgggcgtttaagccggatggggttatcatgtttagtgatattttgactccgttgccggcgttggggatcgagttcgatgtcgtgaaggggaaagggccggtggtgacgccggtgaggacgatggacgacgtcaaggcgatgaagcagctggacgatccagattcgcaattgccgttcgttcgtgagattttgagcacgcttcggaaagaaatcgaaggccaatccaccatgcttggtttcatcggttcgccgtggacgctcgcggcgtacgccatggaaggttcgagcgatcgacacttggtgacgacgaagcaaatcatgacgcaagatccggagacgctgcacgcgtttttgtccaagttagccgacgctctcggtgtgtacgtgtgccatcagatcgacagtggtgcgcaagtggtgcaaattttcgattcttgggcccaccacctttcgccgcaacagtatctcgagttttcccacccgtataacgagcgcgtcatcgcgtacgtcaagcagcgttatccggacactccgctcatcttccacgcgaacggcggatgcggcaagcttcacgagctcaagaaatctacggcggatgtaattggattggattggaacacgagcatgagcgaggcgcgagcggtgctcggtccggatcgcgtgttgcaaggaaacatggatcccatgtacctcttcgcgagcccggagcgcattagacaagaggtggcgaacaacgtgagagacgccggtagcaggaagcacatcttgaacgtcggtcacggtgtggttcaaggcactccggaggagaacgtcggacacttctgcgatgcggcgcgggcgtcggtttacgcgcccaaggcggttgcgcgatag

SEQ ID NO: 444 - protein, 394 aa, Ostreococcus lucimarinus
MHGLTIGATRAMTLAKRDVVGKSDARGRRMRTRRTTTTTAAAGGNQDPILLRAARGEDVERPPVWLMRQAGRYMAEFRAYSTKYGFRHRSETPEIAIELSMQPWRAFKPDGVIMFSDILTPLPALGIEFDVVKGKGPVVTPVRTMDDVKAMKQLDDPDSQLPFVREILSTLRKEIEGQSTMLGFIGSPWTLAAYAMEGSSDRHLVTTKQIMTQDPETLHAFLSKLADALGVYVCHQIDSGAQVVQIFDSWAHHLSPQQYLEFSHPYNERVIAYVKQRYPDTPLIFHANGGCGKLHELKKSTADVIGLDWNTSMSEARAVLGPDRVLQGNMDPMYLFASPERIRQEVANNVRDAGSRKHILNVGHGVVQGTPEENVGHFCDAARASVYAPKAVAR

SEQ ID NO: 445 - DNA, 966 bp, Ostreococcus sp. RCC809
atgatgcgtcaggctgggaggtacatgaaggagtatcgagacgtggcggccaagcacccgggctttcgagagcgaagcgagacgacggatttgatttgtgagattacgttacagccgtttcgagcgtttcaaccggacggggtgattctgttcagtgacatcctgacgccgtttccggcgttcgggatcgattttgagattgatgattacaaagggccgatgctggagaagacgattcgaagcgccgaggatttgaagatgttgcacgacgtcgatttgagtaaagtcgaattcgtcggtgaatcgctgagcatcctgagacgagaggtcggggacgacgccgcggtgttggggttcgtcggtgcgccgtggacgctgtgcacgtacatcgtcgagggtcaatcgacgtcgacgtataaaaccatcaagtcgatgtgctttagcgcgcccgacgtgttgcataaactcttgagctcggtggcggacgcgttggcggtgtacatcgggtaccagattgattccggcgcgcaggtgattcaagtgttcgactcgtggggcggtcaattgccgccgcacatgtgggaagaatggagcaagccgtacatcgatcgcatcgtgcgcaaggtgaacgagacgcacccgggcgtgcccatcaccctctacgccaacgggaacggtggtctcttggagcgcatggccaccttacccgtggatacgatcggtttggattggaccatcgacatggcggacggcagacgccgatgcggtgacaaggcggtgcagggcaacgtcgatcccgtcgtcctcttcgccgaccaagacgccatcgaacaggcggtgcgcgacgtgtgcgccaaggcgggtccgaccggtcacgtcctcaacctcggtcacggtgtcttggtcggcaccccggaggaaaacgtcaagcacttcttcgacgtgtccaagacgatcacgtattaa

SEQ ID NO: 446 - protein, 321 aa, Ostreococcus sp. RCC809
MMRQAGRYMKEYRDVAAKHPGFRERSETTDLICEITLQPFRAFQPDGVILFSDILTPFPAFGIDFEIDDYKGPMLEKTIRSAEDLKMLHDVDLSKVEFVGESLSILRREVGDDAAVLGFVGAPWTLCTYIVEGQSTSTYKTIKSMCFSAPDVLHKLLSSVADALAVYIGYQIDSGAQVIQVFDSWGGQLPPHMWEEWSKPYIDRIVRKVNETHPGVPITLYANGNGGLLERMATLPVDTIGLDWTIDMADGRRRCGDKAVQGNVDPVVLFADQDAIEQAVRDVCAKAGPTGHVLNLGHGVLVGTPEENVKHFFDVSKTITY

SEQ ID NO: 447 - DNA, 1131 bp, Ostreococcus sp. RCC809
atggcgccccgaggcgcgggcgcgaccgcgcgcgcgagaggtgcgctcgcgcgcgtcgacgcggcgaacggagaggcgaaagatcccattctattgcgcgcggcgcggggtgaggacgtcgagcgaccgccggtgtggttgatgcgtcaggcggggaggtacatggcggagtttcgcgcgtacagcaccaagtacgggtttcgatacaggtcggagacgccggaaatcgcgattgaactctccatgcagccgtggcgggcgtttaagccggacggtgtgatcatgtttagcgatatcttgacgccgttgccggcgctcgggatcgagttcgatgtggtgaagggtaagggaccggtggtggaaccggtgcgcacgatggcggacgtcaacgcgatgaaacagctcgatgatccggactcgcagttgccgttcgttcgggagattctcagcacgcttcgaaaggagatcgatggacagtccaccatgctcggtttcgttggatctccgtggacgctcgcggcgtacgccatggagggttccagcgacagacacttgatgacgacgaagcaaatcatgacgcaagatccagagacgcttcacgcgttcttgtctaagttggcggacgcgctcggcgtgtacgtgtgccaccaaatcgatagtggtgcgcaagtagtgcagatcttcgattcctgggcgcaccacctctctccgcagcaattcctcgagttttcccacccgtacaacgagcgcatcatcgcttacgtcaaggaacgacacccggagacgccgctcatcttccacgcgaacggtggcgtcggtaagctccacgagctcaagaagtccactgcggacgtcattggtttggattggaacacgagcatgagcgaagcgagagccatcctcggccccgatcgcgtcttgcaaggtaacatggaccccatgtacctcttcgcgagtccggatcgcattagagaggaggtggcgatgaacgtgaaggacgcgggcaacggtatgcacatcttgaacgtcggacacggggtggctcaaggcaccccggaagagaacgtcggtcacttctgcgacactgcgcgtgcgtcattatatgccgaggttggcgccccggcgcgttag

SEQ ID NO: 448 - protein, 376 aa, Ostreococcus sp. RCC809
MAPRGAGATARARGALARVDAANGEAKDPILLRAARGEDVERPPVWLMRQAGRYMAEFRAYSTKYGFRYRSETPEIAIELSMQPWRAFKPDGVIMFSDILTPLPALGIEFDVVKGKGPVVEPVRTMADVNAMKQLDDPDSQLPFVREILSTLRKEIDGQSTMLGFVGSPWTLAAYAMEGSSDRHLMTTKQIMTQDPETLHAFLSKLADALGVYVCHQIDSGAQVVQIFDSWAHHLSPQQFLEFSHPYNERIIAYVKERHPETPLIFHANGGVGKLHELKKSTADVIGLDWNTSMSEARAILGPDRVLQGNMDPMYLFASPDRIREEVAMNVKDAGNGMHILNVGHGVAQGTPEENVGHFCDTARASLYAEVGAPAR

SEQ ID NO: 449 - DNA, 1209 bp, Oryza sativa
atgatctccgcgacggccaccgccgccttcctcgccgcggcgccggcctcctcctcctcctgcaccacccaccgccggcgcagcggccttcccgccatctccgcgtccctcgcaaccgcctcctccactgaggagccgctgctggtgcgggcggcgaggggcgaggacgggctgccgcggccgccggcgtggatgatgcggcaggccgggcggtacatggcggagtaccaggcgctcgccaagcgccacccctcgttccgggagcggtccgagacgaccgaactcatcgtcgagatcacgctgcaaccgtggcgcgccttcgcgcccgacggcgtcatcctgttctcggacatactcacgccgctgccggccattggggtgccattcgatatctccgactccaaggggcctgtgatccagtctcccgtgaggtccgaggagcaggtgagggagctcacccccattgacttcgagaagctccggttcgtcggtgagtcgctcaagattctacgcactgagattgatggacaagctgctttgctaggatttgtgggggccccatggacaattgcaacttatgttgttgaaggggggatgaccaacacttacacaaatataaagagcatgtgccacacagcaccaaatgtgttaaggggacttttgtctcaccttgcagacgccatatctgaatacattatttaccaagtaaactctggggctcaatgtatacaaatatttgattcatggggtggacaacttccacctcatgtgtgggagcagtggtcaaaaccatatatcaagcagattgtgaataagattaagattgaatgccccaatgtaccacttgttctctatataaatggaaatggaggcttgcttgagcgaatgacggacacaggagtcgatgttattggtcttgactggacagtggatatggcagatggaaggagacgccttggtaacaaaattagtgtacaggggaatgttgacccagcatttctattttctccattaccagtactgaccgatgaaattcatagggttgtcaaatcagctggtccaaaaggtcatatactaaacttgggccatggtgttcttgtaaaaacaccagaagaagctgtagctcatttctttgatgtcacgaggagcttgagatatgacacacttttccaaggttgtgttactgaagttttggagcctgttgcttaa

SEQ ID NO: 450 - protein, 402 aa, Oryza sativa
MISATATAAFLAAAPASSSSCTTHRRRSGLPAISASLATASSTEEPLLVRAARGEDGLPRPPAWMMRQAGRYMAEYQALAKRHPSFRERSETTELIVEITLQPWRAFAPDGVILFSDILTPLPAIGVPFDISDSKGPVIQSPVRSEEQVRELTPIDFEKLRFVGESLKILRTEIDGQAALLGFVGAPWTIATYVVEGGMTNTYTNIKSMCHTAPNVLRGLLSHLADAISEYIIYQVNSGAQCIQIFDSWGGQLPPHVWEQWSKPYIKQIVNKIKIECPNVPLVLYINGNGGLLERMTDTGVDVIGLDWTVDMADGRRRLGNKISVQGNVDPAFLFSPLPVLTDEIHRVVKSAGPKGHILNLGHGVLVKTPEEAVAHFFDVTRSLRYDTLFQGCVTEVLEPVA

SEQ ID NO: 451 - DNA, 1173 bp, Oryza sativa
atggcgaccgcgtgcccgccgctctcgctgcagccggcctacctctcggggaggtccgcgcgcgcgcgccgcccgccgcccgccgtccgctgcagcgccgtcggagaggttatggcggagacggcggcggtcgggacggcggaggagccgctgctggtgagcgcgatcaaggggaggaaggtcgagagaccgccggtctggctcatgaggcaggccgggaggtacatgaagagctatcaattgctctgcgagcgacatccttcattccgtgaaagatcagaaaatgttgaccttgttgttgagatctctctacaaccatggaaggttttcaagcccgatggagttatcctgttctcagatatccttacaccgcttcctgggatgaacataccttttgacattgtgaaaggaaaaggtccagtgatatttgatcccttgagaacagcagctgctgtgaatgaggtcagagaatttgttccagaggagtgggtcccatatgttgggcaggctttaaacattttgcgggaagaggttaacaatgaagctgccgtgttgggctttgttggagctccctttacattggcatcctattgtgttgaaggaggttcatcaaaaaacttttcaaagattaagaaaatggccttctcagaaccagagattctgcataatttgctacagaaatttactacgtccatggctaactacattaaataccaagctgacaacggagcacaagctgtccaaatttttgactcatgggctacagaactcagcccagttgattttgaggagtttagcttgccttatctgaagcagattgtggatagtgtcaaagaaacacatcctgaattgcctctgatactatatgcaagtggatctggtggactgctggagaggcttccactgacaggtgttgatgttgttagcttggactggacggttgatatggctgaggggaggaaaagattgggatctaacatagcggttcaagggaatgttgaccctggcgttctttttgggtcaaaagagttcataagcaagcggatttttgacactgtgcagaaagctggtaatagtgggcatgtattgaaccttggtcatggcattaaggtaggcactcctgaggaaaatgttgcccatttctttgaggttgcaaaagggatcagatactga

SEQ ID NO: 452 - protein, 390 aa, Oryza sativa; identical to SEQ ID NO: 438

SEQ ID NO: 453 - DNA, 1020 bp, Ostreococcus taurii
atgctccgcgcgatcagaggcgaggacgtcgagcgtccaccgatctggatgatgcgccaagccgggagatacatgaaggtgtatcaggacctgtgcaagcggcacacgacgttccgagagcgaagcgagacggtggatctcgcggtggagatctctctgcagccgtatcgagcgtttaaaccggacggcgttattttgttcagcgatatcttgacgccgctgcaggggatgaacattccgttcgacatcgtgaaggggacgggaccgatcatcttcaacccggtgcgagagatggaggatatcaaggcgatcacgaatttggagcctgagaagagcgtgccgttcgtcggggagtcgcttaaattgttgaggagtgagattgggaacgaggccacgctattggggttctgtggtgcaccgttcacgctggcttcgtacatcgtcgagggtgggacgagctcgcattacaaggtgatcaaaaagatggcgtttgacgcgccggcggtgtacgaagcgctgatgaataagctcacggacgccgtgatcgagtacacgagataccaggcggacgctggggcgcaggtggtgcagatttttgattcctgggcgagcgaattctcaccagcggatttcgaaaagtactgcctcccatacctgcagcgcattgtggccgagtgcaagaagacacacccacacgtgccactcatcatttactccagcggtagcggcggattcctggagcgattggctacgacgaacgccgacgtcctgagcttggatggcaccgtggacatggcagatgctcgacggagactcggtgcaaaccaagcggtgcaggggaacatggaccccgtccacttgttcgcgtcgcaagacttcatcacgaagaaggttcatgaaacgatcgaaaaggccggtaagtccagacacgtcatgaatctcggccacggagtcatggtgggaacgcccgaagagaacgtcgctcacttcttccagacggtgcgcgactaccgctactga

SEQ ID NO: 454 - protein, 339 aa, Ostreococcus taurii
MLRAIRGEDVERPPIWMMRQAGRYMKVYQDLCKRHTTFRERSETVDLAVEISLQPYRAFKPDGVILFSDILTPLQGMNIPFDIVKGTGPIIFNPVREMEDIKAITNLEPEKSVPFVGESLKLLRSEIGNEATLLGFCGAPFTLASYIVEGGTSSHYKVIKKMAFDAPAVYEALMNKLTDAVIEYTRYQADAGAQVVQIFDSWASEFSPADFEKYCLPYLQRIVAECKKTHPHVPLIIYSSGSGGFLERLATTNADVLSLDGTVDMADARRRLGANQAVQGNMDPVHLFASQDFITKKVHETIEKAGKSRHVMNLGHGVMVGTPEENVAHFFQTVRDYRY

SEQ ID NO: 455 - DNA, 1185 bp, Ostreococcus taurii
atggtgccggcgacgcgggcggggacggtgacgcgcgcgacgacgaagggcgatgggcgcgcgtggacggggcgcggatgcgcgcgcgcgcgtcgatcgggcgcgacggtgacgcgcgcgaccgcgaacgggacgagcgatccgatcttgttgcgagcggcgagaggggaggacgtcgagcgctcgccggtgtggctgatgcgccaggctgggcggtacatggcggagtttcgcgcgtacagcacgaagtacgggtttcgacatcgctcggagacgccggagatcgcgatcgagctgtcgatgcaaccgtggcgggcgtataagcccgacggggtgattatgtttagcgatattctcaccccgctgcccgcgctcgggatcgagttcgacgtcgtcaaggggaaggggccggtcgtgcaccaggtgaagtccatggatgacgtgcgagcgatgaagactctggacgacccggagaagtctctgcctttcgttcgagagattttgagctcgctccgaaaggaaattgacggacagtccacgatgctcggtttcatcggctcgccttggacgctcgcggcgtatgccatggagggatcgagcgacaggcacctcgtcacgacgaagcaaatcatgacgcaaaatccagagttgctgcacgccttcttggacaagttggcggacgcacttggcgtgtacgtgtgctaccagatcgagagtggtgcgcaagtggtgcagatattcgactcctgggcgcaccacctctcgccgcagcaattcctcgagttttctcatccgtacaacgagcgcatcatcgcgtacgtgaaggaacgtcatccggaaacgccgctcatcttccacgccaacggtggatgtgggaagctcaatgagctcaaaaagtcgacggcggacgtcattgggttggattggaacacgagtatggtagacgcgcgggctgttctcggaccggatcgcgtgttgcaaggtaacatggatcccatgtacctcttcgcgagcccagagcgaattaagcaagaggtggcaaactgcgtgagagatgcgggcagcagtaagcacatcttgaatgtcggccatggtgtggtacaaggtacgccggaggagagcgttggtcacttctgcgacgcggcgcgcgcgtccgtgcataagaacgcaacactcgcgagataa

SEQ ID NO: 456 - protein, 394 aa, Ostreococcus taurii
MVPATRAGTVTRATTKGDGRAWTGRGCARARRSGATVTRATANGTSDPILLRAARGEDVERSPVWLMRQAGRYMAEFRAYSTKYGFRHRSETPEIAIELSMQPWRAYKPDGVIMFSDILTPLPALGIEFDVVKGKGPVVHQVKSMDDVRAMKTLDDPEKSLPFVREILSSLRKEIDGQSTMLGFIGSPWTLAAYAMEGSSDRHLVTTKQIMTQNPELLHAFLDKLADALGVYVCYQIESGAQVVQIFDSWAHHLSPQQFLEFSHPYNERIIAYVKERHPETPLIFHANGGCGKLNELKKSTADVIGLDWNTSMVDARAVLGPDRVLQGNMDPMYLFASPERIKQEVANCVRDAGSSKHILNVGHGVVQGTPEESVGHFCDAARASVHKNATLAR

SEQ ID NO: 457 - DNA, 966 bp, Ostreococcus taurii
atgatgcgacaagcggggagatacatgaaggagtatcgcgacctcgcggcgaagcacccgagctttcgggagcggagcgagaccacggatttgatcgtcgagatcacgatgcagccgtttcgggcgtttaaaccggatggagtgattttgtttagcgatatattgaccccgtttccggcgttcgggatcgatttcgagattgacgactacaaaggaccgatgctggagaagacgattacgaccgaggaggatttgaagatgcttcgcgaggtcgatctgtccaaggtggagttcgtcgccgacgcgctgaagattttgagacaagaggtcggagacgaagcggctgttctcgggttcgtcggcgcgccgtggacgctgtgcacgtacatcgtcgaggggaagtcgacgagcacgtacaaaaccatcaagtccatgtgcttcaccgctccggatgtcctgcgcacgctgttgtcgcacgtcgcggacgcgttggcggtgtacattggatttcaaatcgacgcgggggcgcaggttattcaaattttcgactcgtggggggggcaactgccgccgcacatgtgggaggagtggagcaagccgtacatcgagcgcgtcgtgaacaaggtgaagcaaacgcacccaggagtgccgatcacgctctacgccaacggttcgggcggactgttggagcgcatggcgactctcccggtggacaccatcggtttggactggacgatcgacatggaggacggtagacgccgcgtcggcgacaaggcggtgcagggcaacgtcgatccggtagttctcttcgccggggacgacgcgatcgaaaaggccgttcgggacgtgtgccgcaaggcgggcccgaccggacacgtcctcaacctcggtcacggcgtgctcgtgggaactcccgaagaggcggtcaagcacttcttcgacgtctccaagacgattacgtactga

SEQ ID NO: 458 - protein, 321 aa, Ostreococcus taurii
MMRQAGRYMKEYRDLAAKHPSFRERSETTDLIVEITMQPFRAFKPDGVILFSDILTPFPAFGIDFEIDDYKGPMLEKTITTEEDLKMLREVDLSKVEFVADALKILRQEVGDEAAVLGFVGAPWTLCTYIVEGKSTSTYKTIKSMCFTAPDVLRTLLSHVADALAVYIGFQIDAGAQVIQIFDSWGGQLPPHMWEEWSKPYIERVVNKVKQTHPGVPITLYANGSGGLLERMATLPVDTIGLDWTIDMEDGRRRVGDKAVQGNVDPVVLFAGDDAIEKAVRDVCRKAGPTGHVLNLGHGVLVGTPEEAVKHFFDVSKTITY

SEQ ID NO: 459 - DNA, 1002 bp, Physcomitrella patens
atgatgaggcaggcgggccggtacatggctgtgtatcgaaagcttgcggagaagcatccctcgtttcgagagaggtctgagaatgtggatttgatagtggagatttccttgcagccctggaaggcgttccgacctgatggagttataatattttcggatattctgacacctcttccggcaattggtatcccatttgagattgacgaagcgaaggggccacttcttgagacacccattgtgtctgaggaggggttggaagctcttcaccccattgatctcgacaaggtcaactttgtaggggagtccctcagcatcttgcgggaagaggtgggcgatggagcagcagtgttagggtttgtaggctcaccatggaccttggccacgtacattgtggaagggaagaccacccgcacttacacaaagatcaagagcatgacacatcaacagccagaattgctcaagtctattttatcccatttggcaaacgagattgctgagtacgttatattccaagtcaaagctggtgcacaatgtatacagatctttgactcttggggtgggcagcttcctcctcaccagtgggatcagtggtcgaagccctatattcagcagcttgtggccaaggtgagagacgcttgcccgggggtaccattggtgatgtacataaacgggaacggcggcttgctcgagaggatggctacagttgatgttgacgttataggacttgattggactatagatatggcagacgggcgaagacgactcggggactcgatagcagtgcaaggcaatgtggacccagctgttctctttgccccattacctgcaattactgaagcgattgaaagtgtggtgagcaaggcgggaactaatggtcatattcttaacctaggtcacggtgtccttgtgggcactcctgaggaaggcgtggctcatttttttgacactgcccgtagtctctcctatgaatctgctgtacttgcgacttcaagcttgtcgtag

SEQ ID NO: 460 - protein, 333 aa, Physcomitrella patens
MMRQAGRYMAVYRKLAEKHPSFRERSENVDLIVEISLQPWKAFRPDGVIIFSDILTPLPAIGIPFEIDEAKGPLLETPIVSEEGLEALHPIDLDKVNFVGESLSILREEVGDGAAVLGFVGSPWTLATYIVEGKTTRTYTKIKSMTHQQPELLKSILSHLANEIAEYVIFQVKAGAQCIQIFDSWGGQLPPHQWDQWSKPYIQQLVAKVRDACPGVPLVMYINGNGGLLERMATVDVDVIGLDWTIDMADGRRRLGDSIAVQGNVDPAVLFAPLPAITEAIESVVSKAGTNGHILNLGHGVLVGTPEEGVAHFFDTARSLSYESAVLATSSLS

SEQ ID NO: 461 - DNA, 1164 bp, Physcomitrella patens
atgcgtcgtagtggctctgtgcattgtaaaccctacgcgtgccgtgctactagcggtggggaggggagcgatgcgaggagcggcgcggagccgttgctgctgagagtggcgcgtggagaggaggcagagcggacgccggtgtggctcatgcggcaagctggacgctacatggccgattttcgcaagttttcggataggatttcgtttagggaaaggtccgagacggcagacattgcaattgagctctctttgcagccatggctagcattccgaaccgatggggttattatgttttccgacattcttacaccattgccagcccttggcatcgagttcaccatggtcaagggtaagggccccgtcattccttctcccgttcgtactctcgaagatatccagaacttgaggacgctagacgacccggaccagtctctccccttcataagacagatactctcgtcactgaggaaagaggtggaggggaaagctactttgataggattcatcggcactccgtggaccctcgccgcatatgccatggagggctcgtctgacaagaacctcatcaagacaaaaagtatcatgatgcacaaccctgagatcttgcatgcctttttagctcacctcacagatgctctcgtaacctacgtttgtcaccaaatcgactccggtgctcaaattgttcagctcttcgattcgtgggcgcaccatctctcccccgagcaattcagtgaatttagttggccttatgcagagcaattgatagatagggtgaagatcgctcgtcctgatgtcccattgatattccatgcgaacggtggaactggcaaactacatattgttgcacagaggaaacatcaggacgtcgtggtgggtctggattgggccactgaaatgcgagaagcgaggtcacttctcggcccgaagacagttctccaaggcaatgttgaccccatggttctttttggatctgaggatgtgattcgaagggctgctgagcagaacattagagacgcaggcggaaattatcacattctgaacgtcggccatggcgtcgttcagggtactcctgaagaatccgtgaagcttttctgtcaggtagctagggaaagcggtaaattgtcgccaaatgtaagtccttctgccgagcttctacaggtttag

SEQ ID NO: 462 - protein, 387 aa, Physcomitrella patens
MRRSGSVHCKPYACRATSGGEGSDARSGAEPLLLRVARGEEAERTPVWLMRQAGRYMADFRKFSDRISFRERSETADIAIELSLQPWLAFRTDGVIMFSDILTPLPALGIEFTMVKGKGPVIPSPVRTLEDIQNLRTLDDPDQSLPFIRQILSSLRKEVEGKATLIGFIGTPWTLAAYAMEGSSDKNLIKTKSIMMHNPEILHAFLAHLTDALVTYVCHQIDSGAQIVQLFDSWAHHLSPEQFSEFSWPYAEQLIDRVKIARPDVPLIFHANGGTGKLHIVAQRKHQDVVVGLDWATEMREARSLLGPKTVLQGNVDPMVLFGSEDVIRRAAEQNIRDAGGNYHILNVGHGVVQGTPEESVKLFCQVARESGKLSPNVSPSAELLQV

SEQ ID NO: 463 - DNA, 1236 bp, Physcomitrella patens
atggccaccaccgctgcttctctccctgctgccacctccagcgccgtttcgtccagctcttgcagagtttttgggaattcgcgtccgttgaagacgtcatggactggcgccaaggttttggccgtgaagcccaggactaagtgcgttgcgcaggctgttgctgctgaaattaaggaagctggggcgaatgtggacacatcctcagatcctctgctcctgagggcggtgcgcggtgaggaagtcgataggccgccggtgtggatgatgaggcaagctggccgatacatgaaggtgtatcaagatctatgtcagaaacaccctactttcagggagcgctctgagaatgtggatttggcagtcgagatttcattgcagccatggcgagcattcaaacccgacggagttattctattctcagacatcttgaccccatttaccggcatgaacatccccttcgatatcctgaagaccaagggccctatcattcataatcctattcggaccgctgccgacgtcgccaaagtgcgagagttggtacctgctgaagcggtgccgtatgtcggccaggctcttactgccttgcgtgaggaggtcggtaatgcttccacagttcttggatttgttggagcacccttcacgttggcatcctacatagtcgagggcggatcatctaaacatttcaccgtaatcaagaggatggctttcgagactcctgaggttctgcactctctacttcagaaacttgcggaatcggttatcatatacgtacgctatcaagctgattgtggtgcgcaagctgtccaaatctttgactcatgggcaacccacttgagtccagtagatttcgaggtgttcagcctgccctacatcaagcagattgtcagtgcagtgaagtccacccaccccgatctcccattgatcttgtatgcaagtggaagtggtggcctcttggagcggatggcttctacaggggttgacgtagtcagtgttgattggactgttgacatggctgaggccaggcagcgtattggtactcaactagctgttcagcagggtaatatggatcctgctgctctgtttggaaccaaggaattcatcgaaaggagaatacatgacactgttgctaaggccgggcggcacaaacatattctaaaccttggacatggtgtgttggtgggtacacctgaagagaatgtggcgcacttttttgaaacgggtaaaagcgtacgatattga

SEQ ID NO: 464 - protein, 411 aa, Physcomitrella patens
MATTAASLPAATSSAVSSSSCRVFGNSRPLKTSWTGAKVLAVKPRTKCVAQAVAAEIKEAGANVDTSSDPLLLRAVRGEEVDRPPVWMMRQAGRYMKVYQDLCQKHPTFRERSENVDLAVEISLQPWRAFKPDGVILFSDILTPFTGMNIPFDILKTKGPIIHNPIRTAADVAKVRELVPAEAVPYVGQALTALREEVGNASTVLGFVGAPFTLASYIVEGGSSKHFTVIKRMAFETPEVLHSLLQKLAESVIIYVRYQADCGAQAVQIFDSWATHLSPVDFEVFSLPYIKQIVSAVKSTHPDLPLILYASGSGGLLERMASTGVDVVSVDWTVDMAEARQRIGTQLAVQQGNMDPAALFGTKEFIERRIHDTVAKAGRHKHILNLGHGVLVGTPEENVAHFFETGKSVRY

SEQ ID NO: 465 - DNA, 1023 bp, Prunus persica
atgatgcgccaagcaggaaggtatatggccgtttacagaaagcttgcagagaaatatccatcattcagagagaggtcagagacaactgatctcattgtggaaatttctttgcagccttgggaagctttccatcctgacggagtgattattttctcagacatacttacccctctacctgcatttggtgtgctgtttgacatagaagacattcggggtcctgttatccagtcaccaattgtttctgaagagggtttgaagactttacatccaattgacttggataaacttcagtttgtgggggaatccttaaagatattgcggcaggaggttggcgggcaagctgctgttttgggttttgtaggggcaccttggacgattgctacatacatagtagaagggggttcaacttccacgtatacaacaataaagagcatgtgccatacagcaccacatgtattgagggctcttctttcgcatttgacacaggcaatatctgactatattgttttccaagtagaagcaggggctcattgtatacaaatatttgattcatggggtgggcaactaccaccaagcatgtgggatagctggtcgaagccatatattcaagagatcgtgagttcagttaggaaaagatgccctaaaacaccacttgttctgtacattaatgggaatggcggccttcttgagcgtatgaaaggaactggagtagatgtgattgggcttgactggacggtggacatggcagatggtagaaaacgattgggtagtgagatcagtgtacagggaaatgtggaccctgcttacctattttctcctcttccatccctgactgaagaaattctaagggtggtgaggtctgcagggccaaggggacacattctcaatctagggcatggtgttcttgtacggacacctgaagaatccgttagacatttctttgaagttgcaagaagcttgaattatgatacatttctacaaacacaaacaccgaccgaaggaattggtagtttagtgatataa

SEQ ID NO: 466 - protein, 340 aa, Prunus persica
MMRQAGRYMAVYRKLAEKYPSFRERSETTDLIVEISLQPWEAFHPDGVIIFSDILTPLPAFGVLFDIEDIRGPVIQSPIVSEEGLKTLHPIDLDKLQFVGESLKILRQEVGGQAAVLGFVGAPWTIATYIVEGGSTSTYTTIKSMCHTAPHVLRALLSHLTQAISDYIVFQVEAGAHCIQIFDSWGGQLPPSMWDSWSKPYIQEIVSSVRKRCPKTPLVLYINGNGGLLERMKGTGVDVIGLDWTVDMADGRKRLGSEISVQGNVDPAYLFSPLPSLTEEILRVVRSAGPRGHILNLGHGVLVRTPEESVRHFFEVARSLNYDTFLQTQTPTEGIGSLVI

SEQ ID NO: 467 - DNA, 1176 bp, Pinus taeda
atggcttccatccattgcctctggccacgcttgtacataattcatcatccatcatcaaatggcatgcccacttctccacggctcaaatccagagtccattgtgccatgacagagtctgttgccaaagcaaaccctagtactactgctgaaccactcctccttcgtgttgtccggggagaaacagtggaaaggcctcctgtttggcttatgagacaagcagggagatacatgaagagctatcaacaattatgcgagaagtaccccttattccgtgaaaggtcagaaaacgttgatcttgcagttgaaatctctttgcaaccatggaaagctttcaagccagatggagttattttgttctcggacatacttactcctttgacaggaatgaatattccttttgatatagttaaaggaaaaggtccagttatttataagccaatccagactttagctgatgtggctgacgttcaagagtttatcccacaggagtcagtgccatatgttggtgaggcactgtcaattttgcaagcagaggtaaacaatgaagctgcagttctaggatttgtaggagctccatttactctggcttcatatgttgtagaaggtggatcttcaaagcactttgcaaaaattaagcatatggcattctgtatgcccaaggttctgcatgcactgctgcatatatttgcagagtctatggcgaattacatttgctatcaagcagacaatggagctcaagtggtccagatttttgactcttgggcaacagagcttagtccagtggattttgaagaattcagtcttccttacttgaagtacattgtggagtctgtgaaaaaaacccaccccaacttgcccctaattctttatgccagtggatctggaggattgctagaaaggcttccgttatctggtgttgatgttattagtctggactggacagttgatatcgcagaagctagaagaagaataggattagatattgcagtgcagggtaatgttgatcctggtgcactctttggatccaaggacttcattacaaaacgaatttatgacacagtgtctaaagcaggaaataaaaaacacattcttaatctagggcatggtgtgctattaggcacaccagaggataatgttgctcatttttttgaggtggcaaaagggatcagatattag

SEQ ID NO: 468 - protein, 391 aa, Pinus taeda
MASIHCLWPRLYIIHHPSSNGMPTSPRLKSRVHCAMTESVAKANPSTTAEPLLLRVVRGETVERPPVWLMRQAGRYMKSYQQLCEKYPLFRERSENVDLAVEISLQPWKAFKPDGVILFSDILTPLTGMNIPFDIVKGKGPVIYKPIQTLADVADVQEFIPQESVPYVGEALSILQAEVNNEAAVLGFVGAPFTLASYVVEGGSSKHFAKIKHMAFCMPKVLHALLHIFAESMANYICYQADNGAQVVQIFDSWATELSPVDFEEFSLPYLKYIVESVKKTHPNLPLILYASGSGGLLERLPLSGVDVISLDWTVDIAEARRRIGLDIAVQGNVDPGALFGSKDFITKRIYDTVSKAGNKKHILNLGHGVLLGTPEDNVAHFFEVAKGIRY

SEQ ID NO: 469 - DNA, 1212 bp, Populus tremuloides
atgtcttccatttgcagctttacttcctccatttcctcaatctctccttttacatctccaagaaagtctctcaactataacaacaagtacactccaatcatccactcttcccttcaaggaactgtggccgaacctaaagcatcctctgttgccgagccccttttgcttaatgccgttagaggagaagatgttgaaagacctcccgtttggcttatgaggcaagcagggaggaactggtttacaagctatgcacatgtcagctttaaaatgagttaccaaatcatctgtgagaagcatccttcatttcgtgaaagatcagaaaatgttgatcttgtagtggaaatttctctacagccatggaaagttttcaggcctgatggagtcattttattctctgacattcttacaccactttctgggatgaatatcccttttgacattgtgaaaggcaagggtcctgtcatattcaatcctttgcgcacagctgatgatgttgatcaagttagggaatttgttcctgaggaatcagttccatatgtcggggaagcattgacagtcctgagaaaagaggtagaaaacaaagctgcagtgctgggcttcgtaggggctcctttcaccctggcttcatatgtagtggaaggtggttcatcaaaacactttactaaaataaagagattagctttctcccagcccaaggttctccacgcattacttcagaaatttgcgacctctatggcaaaatacattcaatatcaagctgacagtggagctcaaactgttcaaatctttgactcatgggccacagagcttagccctgtggattttgaggagttcagtcttccatacttgaagcagatcgtggatactgtgaaacaatcccatccaaatctcccgctaatcctttatgctagtggatctggaggcttgcttgagcggctagctttgacaggtgtagatgttgtaagcttggattggtcagttgatatggctgaaggtaggaagcgattgggacctgatgtagctgttcaggggaatgtagatcctggtgttctatttgggtcaaaggaattcataactaatcggatatatgatgttgtcaagaaagccggtaaaggaaaacatatacttaatcttggtcatggaattgtagtcggcacacctgaggagaatgttgcgcactttttcgaggttgctaaaggaatcagatactaa

SEQ ID NO: 470 - protein, 403 aa, Populus tremuloides
MSSICSFTSSISSISPFTSPRKSLNYNNKYTPIIHSSLQGTVAEPKASSVAEPLLLNAVRGEDVERPPVWLMRQAGRNWFTSYAHVSFKMSYQIICEKHPSFRERSENVDLVVEISLQPWKVFRPDGVILFSDILTPLSGMNIPFDIVKGKGPVIFNPLRTADDVDQVREFVPEESVPYVGEALTVLRKEVENKAAVLGFVGAPFTLASYVVEGGSSKHFTKIKRLAFSQPKVLHALLQKFATSMAKYIQYQADSGAQTVQIFDSWATELSPVDFEEFSLPYLKQIVDTVKQSHPNLPLILYASGSGGLLERLALTGVDVVSLDWSVDMAEGRKRLGPDVAVQGNVDPGVLFGSKEFITNRIYDVVKKAGKGKHILNLGHGIVVGTPEENVAHFFEVAKGIRY

SEQ ID NO: 471 - DNA, 1230 bp, Phaeodactylum tricornutum
atgaaagtgtcccacgtcgctttcagcctgttcctggctggttcccaaacgactgcctttactaatccggtatccaactcggcgaaacaacaatcgttccgtcttccaagttcggcatcgtcggcagcggatacgacctcctcggccaatgtcgctcaaaagagcacgcaagatccgttgcttattcgggcggctcgtggtgaaaaaacagaacgcactcctgtttggatgatgcgacaagctggtcgccacattgcggaataccgggacttgtgcaaaaagtaccccacctttcgcgaacgttccgaaattccggaagtcgccgttgaagtctcgctgcagccttggcgcaattaccagactgatggatgcattctcttttccgatattttgactcctttgccaggtattggatgtgaatttaccattgatgaaaaagttggtcctcttatggaaccgatgcgctcctacgatgacatcaaaaagatgcaccccatggacccatacaagtccacgccatttgtcgccgaagctctcaaggctttgcgccaagaagttggtccggaaactgctgtattaggctttgttggatgcccttatacactggcaacatacattgtggaaggcaaaacatccaaggaatacctggaaattaagaaaatggccttgaacgaacctgatcttcttcacgctattctgcaacaattggcggacaacattggagactacgcccttttccagattgagaacggcgcccagctgattcagatttttgattcttgggccggacatctatcaccccgggactacaatacttttgcagctccttaccaaaagcaaattcttgacaaaattaaggaaaagtaccctgacgtcccgacggtcatttacatcaagcactcaggtgcattgattgaacgcatggcggcgacgggcgtagatgtcgtttcgttagactggactgtcgatatggcggacgggcgtgatcgcatcgaggccggacgcaagtccgctggtcttgaaggacgtgggggtgtacaaggaaacttggatccagccgttttattcgccaatcacgatgttattgaagaacgagcgattgaaattctcaaaaaagcaggcagcgttgggcatgtcatgaacttggggcatggtattgaagccgctacaccagaagaaaacgcacaccattttattgaaactgtcagaggctatcgtcatgaggagtag

SEQ ID NO: 472 - protein, 409 aa, Phaeodactylum tricornutum
MKVSHVAFSLFLAGSQTTAFTNPVSNSAKQQSFRLPSSASSAADTTSSANVAQKSTQDPLLIRAARGEKTERTPVWMMRQAGRHIAEYRDLCKKYPTFRERSEIPEVAVEVSLQPWRNYQTDGCILFSDILTPLPGIGCEFTIDEKVGPLMEPMRSYDDIKKMHPMDPYKSTPFVAEALKALRQEVGPETAVLGFVGCPYTLATYIVEGKTSKEYLEIKKMALNEPDLLHAILQQLADNIGDYALFQIENGAQLIQIFDSWAGHLSPRDYNTFAAPYQKQILDKIKEKYPDVPTVIYIKHSGALIERMAATGVDVVSLDWTVDMADGRDRIEAGRKSAGLEGRGGVQGNLDPAVLFANHDVIEERAIEILKKAGSVGHVMNLGHGIEAATPEENAHHFIETVRGYRHEE

SEQ ID NO: 473 - DNA, 1296 bp, Phaeodactylum tricornutum
atgagattctctagtacctcggtttggacgattgcactattggcggtgagcagtagtccaacggcgatgaccaatgcttggatgacgacaccagtaacgtcctcgtcctcgtcgcatcttcgtactaccaccaaccggactcccctgcgcttgtcctcctccagcgcgacaacgactgccgcggcggacgaacgcgtggtgtggggcaaggtcaaatcgcacgaccattgccgagaaccacacgatcgcgacattttggtgcgggccgcccgcggggaaaccgtcgaacgcacaccggtatggatgatgcgtcaagcgggtcggtacatggaagccttccgcgagtactccgacgttttgccctttcgggaacgctcggaaacgcccgattatgccgtggagctctcactacaatgtcaccgggcttacggcatggacggcatcattatgtttagcgatattctcacgccgctaccgactctgggtatcgactttgatgtcgtcaaagggaccggaccggttattaccaccaaggttcggaccgaagaagacgtcaacaatatgccacgccacgaattcgacgacaaggttccctttattaaggaaatattgaatcgtctctcacaagaagccgaggacgccaacacatcgttgattggctttgtcggcgcaccctttacgctcgccgcctacactattgaaggaaagtcgtccaaggactgcttgacgaccaaaaagcttctcatggcggacgaacgtggcgataatgcctgcatcagtttgtttttggacaaacttgccgatatgattggcgactacgcctgctaccaaatcgagcacggcgcacaagtcattcaggtcttcgaatcctgggcacaccaattgtccccacactggttcgaaacgtacgccaagcctgctgcgcaaaaggccattcgtaaaatcaagagccaatacccggacactcccgtcatttactttgccaacggcggatcatcttacttggaattgcaacgagatatgggtgccgacatgattgccgtcgactgggcggtcaacttatcccaggcccgcaccattctgggacccgatgtgcccgtttcgggcaatctcgatccgaccgtgttgttcggtagtaaagagcagatcgagcaggctgtacgggattgtattgatcaagccggtgggccaggaagacatcttctcaaccttggccacggcgtcatgcaagggacaccagaagaggccgtgaaatggctggtggatgaagtcaaacggtacaagggtaaagcgtaa

SEQ ID NO: 474 - protein, 431 aa, Phaeodactylum tricornutum
MRFSSTSVWTIALLAVSSSPTAMTNAWMTTPVTSSSSSHLRTTTNRTPLRLSSSSATTTAAADERVVWGKVKSHDHCREPHDRDILVRAARGETVERTPVWMMRQAGRYMEAFREYSDVLPFRERSETPDYAVELSLQCHRAYGMDGIIMFSDILTPLPTLGIDFDVVKGTGPVITTKVRTEEDVNNMPRHEFDDKVPFIKEILNRLSQEAEDANTSLIGFVGAPFTLAAYTIEGKSSKDCLTTKKLLMADERGDNACISLFLDKLADMIGDYACYQIEHGAQVIQVFESWAHQLSPHWFETYAKPAAQKAIRKIKSQYPDTPVIYFANGGSSYLELQRDMGADMIAVDWAVNLSQARTILGPDVPVSGNLDPTVLFGSKEQIEQAVRDCIDQAGGPGRHLLNLGHGVMQGTPEEAVKWLVDEVKRYKGKA

SEQ ID NO: 475 - DNA, 807 bp, Ricinus communis
atgtcttgcatttgtagcattagctcaatttcttctttctctactctctactcttctccaagaaaatcagtatctaaacctccaattatccactgttcccttccagggactgtggctgaacccaagcctgcctctgtagctgaacctttattgcttaatgctgttagaggagaagatgttgaaagacctccagtttggcttatgaggcaagcagggaggtacatgaagagttaccaaataatttgtgagaagtatccttcatttcgtgaaagatcagaaaatgttgatcttgtggtggagatttctctacagccttggaatgtcttcaagccagatggggtcattttattctcagacattcttacaccactatctggaatgaatatacctttcgacattgtgaaaggtaaaggccctattatattcaaccctttacgcactgctgaagatgttgatcaagtgagagaatttgttccggaggagtcagttccatatgttggagaatcattgacaatcctgcgaaaagaggtagataacaaagctgcagtgcttggttttgttggcgctcctttcaccctggcatcatattgtgttgaaggcggttcgtcaaaacacttctcaaaaataaaaagattagctttctcccagcccgaggttcttcatgcactgcttcagaagtttgcaacttccatggcaaagtatgttcaatatcaagctgacaatggagctcaagctgttcagatctttgactcatgggccacagaacttagccctgttgatttgagcagttcagtcttccatacttga

SEQ ID NO: 476 - protein, 268 aa, Ricinus communis
MSCICSISSISSFSTLYSSPRKSVSKPPIIHCSLPGTVAEPKPASVAEPLLLNAVRGEDVERPPVWLMRQAGRYMKSYQIICEKYPSFRERSENVDLVVEISLQPWNVFKPDGVILFSDILTPLSGMNIPFDIVKGKGPIIFNPLRTAEDVDQVREFVPEESVPYVGESLTILRKEVDNKAAVLGFVGAPFTLASYCVEGGSSKHFSKIKRLAFSQPEVLHALLQKFATSMAKYVQYQADNGAQAVQIFDSWATELSPVDLSSSVFHT

SEQ ID NO: 477 - DNA, 1185 bp, Sorghum bicolor
atggcgacggcgtgcccgccgctctcgctgccgtccacctccctcttccgcggcaggtccgcccgcgccgggcccagacgccggcagctctccgccgtccgctgcagcgccgtcggagaggcggtagtggaggaggcctcgctcgggacggcggaggagccgctgctggtgagcgcaatcagagggaggaaggtcgacaggccacccgtatggctcatgaggcaggccgggaggtacatgaagagctaccaatcgctctgcgagcgatatccttcgttccgtgaaagatcagaaaatgtcgaccttgttgttgagatctctttgcaaccatggaaggttttcaagcctgacggagtcatcttgttctcggatatccttactccacttcctgggatgaacatacctttcgacattgtgaagggaaaaggtccagtgatctatgatcctttgagaacagcagctgctgttaatgaagtcagagaatttgttcctgaggagtgggtcccttatgtggggcaggctctgaatttgttgcgagaagaggttaagaatgaagctgctgtactaggttttgttggagctccgtttaccttggcatcttattgtgtggaaggaggttcatcaaagaactttacaatgattaagaaaatggccttctcagaaccagcgattctacataatttgctacaaaagttcacaacatcgatgtctaactatattaaataccaagcggacaatggggcgcaggctgtccaaatttttgattcatgggccactgaactcagcccggctgattttgaggagtttagccttccttatctaaagcagatagtggatagtgttaaggaaacacatcctaacttgcctctgatactatatgcaagtggatctgggggcttgctggagaggcttcctttgacaggtgttgatgttgtcagcttggactggacagttgatatggcagagggcaggaaaagattgggatctaacatagcagttcaagggaatgtggaccctggtgttctttttggatccaaagagtttataagcaagcggatttacgacactgtgcagaaggctggcaatgttggacatgtattgaaccttggccatggcatcaaggttggaactccagaggaaaatgttgctcacttctttgaggttgcaaaagggataagatactaa

SEQ ID NO: 478 - protein, 394 aa, Sorghum bicolor
MATACPPLSLPSTSLFRGRSARAGPRRRQLSAVRCSAVGEAVVEEASLGTAEEPLLVSAIRGRKVDRPPVWLMRQAGRYMKSYQSLCERYPSFRERSENVDLVVEISLQPWKVFKPDGVILFSDILTPLPGMNIPFDIVKGKGPVIYDPLRTAAAVNEVREFVPEEWVPYVGQALNLLREEVKNEAAVLGFVGAPFTLASYCVEGGSSKNFTMIKKMAFSEPAILHNLLQKFTTSMSNYIKYQADNGAQAVQIFDSWATELSPADFEEFSLPYLKQIVDSVKETHPNLPLILYASGSGGLLERLPLTGVDVVSLDWTVDMAEGRKRLGSNIAVQGNVDPGVLFGSKEFISKRIYDTVQKAGNVGHVLNLGHGIKVGTPEENVAHFFEVAKGIRY

SEQ ID NO: 479 - DNA, 1215 bp, Sorghum bicolor
atgatgcctccgacggccaccgcgacggccgtcttcctctccgcggcgcccccctctttctcaacccgccgtcggcgcagccgccttcctgccatctccgcatccctttcgccgtcctcctcctcttcctcctccgaggagccgctgctggtgcgcgcggcgcggggcgaggacgggctcccgcgcccgcccgcgtggatgatgcggcaggcggggcggtacatggcggagtaccaggcgctggccaagcgccacccctcgttccgggagcgctccgagaacacggacctcatcgtcgagatcacgctgcagccgtggcgtgccttcgcgcccgacggcgtcatcctgttctcggacatactcacgcccctgccggccatcggggtgcccttcgatatctccgactccaaggggcccgtgatccaatccccagtgcggtccgaagagcaggtgagggagctcgtccccatcgaccttgatatgctccagttcgtcggggagtcgctaaagattctgcgaaatgagattgatggaaaagctgctttgctaggatttgtgggggccccatggacaattgcaacttacgttgttgaaggggggatgaccaacacatacacaaatataaagagcatgtgccatacagctccagatgtcttgaggagtcttctttctcaccttgcacaagcgatatctgactatatcatttaccaagttaactctggggcccagtgtatacagatatttgattcatggggtggacaacttccacctcatgtgtgggagcagtggtcaaaaccatatatcaaacagattgtgagtaggattaagaaagagtgccctcatgtaccccttgtgttgtatataaatggaaatggaggtttacttgagcgcatgaaggacacaggagttgatgttattgggcttgactggacagtggacatgtctgatggaaggaggcgccttggtaatggaattagtgtacaagggaatgtggatccagcatttctgttctcaccattaccagtactgactgatgaaattcatagggttgtgaaatcagctggtccaaaaggtcatatacttaacctgggccatggtgtacttcagaaaacacctgaagaagctgtagcacatttctttgatgtcacaaggagcttgagatatgacacccttttccaaggttctgttgccgaagaactgcagcctgttgcttga

SEQ ID NO: 480 - protein, 404 aa, Sorghum bicolor
MMPPTATATAVFLSAAPPSFSTRRRRSRLPAISASLSPSSSSSSSEEPLLVRAARGEDGLPRPPAWMMRQAGRYMAEYQALAKRHPSFRERSENTDLIVEITLQPWRAFAPDGVILFSDILTPLPAIGVPFDISDSKGPVIQSPVRSEEQVRELVPIDLDMLQFVGESLKILRNEIDGKAALLGFVGAPWTIATYVVEGGMTNTYTNIKSMCHTAPDVLRSLLSHLAQAISDYIIYQVNSGAQCIQIFDSWGGQLPPHVWEQWSKPYIKQIVSRIKKECPHVPLVLYINGNGGLLERMKDTGVDVIGLDWTVDMSDGRRRLGNGISVQGNVDPAFLFSPLPVLTDEIHRVVKSAGPKGHILNLGHGVLQKTPEEAVAHFFDVTRSLRYDTLFQGSVAEELQPVA

SEQ ID NO: 481 - DNA, 1263 bp, Solanum lycorpersicum
atggctatggctttttctccattaacaacaagtgggtgtagtagttattgcaatcttggattaagctggaaatcatcgagcttgtttgtggaattagggtttgtttcaaatgggtcaaaaggggtttctgctaaacccgcaaagctcaatgctagtaaagtttttcgggcatgtgcttcttcttctaactctgatcctcttttggtgaaggctgcaagaagagaacgggtgagtcgcccacccgcttggatgatgcgtcaagcgggaaggtatatggctgtttaccgaaagcttgcggagaaacatccatccttcagagagagatcagagacaactgatctcattgtggaaatttctttgcagccctgggaagcttttcatccagatggtgtaatcatcttttcggacatacttaccccgctacctgcatttggtgtccaatttgacattgaagatgtaagaggcccagtcattcagtctcccattcgttctgaagagggattgaaagcattgcactccattgacttggagaaactacaatttgtgggagactcacttagtattttgaggaaggaggttggagaacaagctgcaattttgggttttgtcggagcgccttggacaattgctacctacatagttgaaggaggtacaactcgtacatatacgaagattaaggacatgtgccataccgctcctcatgttttgagagctttgttatctcatttatcaaaagcaattgctgagtatattgtgtatcaagtggagtctggagctcattgcatccagatatttgattcatggggtggacaactcccacctcatatgtgggactgctggtcaaagccttatattgatgagatagttggtataattaaaagaaagtgcccacaaacacctcttgtgctctacattaacggaaatggtggacttcttgaacggatgaaaacaactggagttgatgtaattggacttgactggacagttgatatggcagatggaaggcggcgactaggaacagatattggtatacaggggaatgtggatcccgctaccttgttttgtcctcttcctgcattgacagatgaaattaaaagggttgtcaagagtgcagggagtagtggtcacatcctcaatcttggccacggtgtgctcgtgggtacgcctgaagaagccgtagctcacttctttgatgttgctaagagtttcgattttgacaaggttgaagatcatgtatctgaggcagataaagttgtagcttga

SEQ ID NO: 482 - protein, 420 aa, Solanum lycorpersicum
MAMAFSPLTTSGCSSYCNLGLSWKSSSLFVELGFVSNGSKGVSAKPAKLNASKVFRACASSSNSDPLLVKAARRERVSRPPAWMMRQAGRYMAVYRKLAEKHPSFRERSETTDLIVEISLQPWEAFHPDGVIIFSDILTPLPAFGVQFDIEDVRGPVIQSPIRSEEGLKALHSIDLEKLQFVGDSLSILRKEVGEQAAILGFVGAPWTIATYIVEGGTTRTYTKIKDMCHTAPHVLRALLSHLSKAIAEYIVYQVESGAHCIQIFDSWGGQLPPHMWDCWSKPYIDEIVGIIKRKCPQTPLVLYINGNGGLLERMKTTGVDVIGLDWTVDMADGRRRLGTDIGIQGNVDPATLFCPLPALTDEIKRVVKSAGSSGHILNLGHGVLVGTPEEAVAHFFDVAKSFDFDKVEDHVSEADKVVA

SEQ ID NO: 483 - DNA, 1167 bp, Solanum lycorpersicum
atgtcttgtatttacagttcagtctcttctttctcaatttcatctaaatcgtcttcttcttctcgctctaaattcaagcccagaatctcttgttccgttggaggaactgttgctgaaccaaaaactataaatgcaacagagcctttgttgcttgatgctgttcggggtaaagaagtagaaaggcctcctgtttggcttatgagacaagcagggaggtacatgaagagttatcaaatcttatgtgagaagcacccatcctttcgtgagagatcagaaaatgtagatcttgtggtagaaatttctctgcagccatggaaagtattccagcctgatggggtcattttgttttcagatattcttactcctctctctggtatgaacatcccttttgacattataaaggggaagggtcctgtcatatttgatccaccgaccacactttctgatgttgagaaagttagagaatttattcctgaagaatcagttccatatgttggagaagcattaacaattttgcggaaagaggtaaataatcaagcagcagttctgggtttcgttggggcaccatttacgttggcttcatatgtggttgaaggtggttcctctaagaactttacaaaaattaagagattagcttttgcggagcccaaggtccttcattcgctgcttcaaatatttgcaacctcaatggctaaatatatccgttatcaagctgaccatggagctcaagcagttcagatctttgattcatgggccacagagctaagcccagtcgattttgaggagttcagtctaccatacttaaaacagatagttgaggcagtgaaactaacccatcctgatctccctctgattctttatgcaagtggatcaggtggcttgcttgagagactacccttgacaggagtagatgtagtcagtttggactggacagttgatatggctgatggtaggagacgactgggtcctaatgtggctatacaaggtaatgtggatcctggagttctctttggctccaaggaatttattaccaaccggataaatgatacagtgaagaaagctggtaaagggaaacatattttgaaccttggacatggcatcaaagtaggtacacctgaggaaaatgttgctcacttctttgaggttgctaaaggtcttaggtattag

SEQ ID NO: 484 - protein, 388 aa, Solanum lycorpersicum
MSCIYSSVSSFSISSKSSSSSRSKFKPRISCSVGGTVAEPKTINATEPLLLDAVRGKEVERPPVWLMRQAGRYMKSYQILCEKHPSFRERSENVDLVVEISLQPWKVFQPDGVILFSDILTPLSGMNIPFDIIKGKGPVIFDPPTTLSDVEKVREFIPEESVPYVGEALTILRKEVNNQAAVLGFVGAPFTLASYVVEGGSSKNFTKIKRLAFAEPKVLHSLLQIFATSMAKYIRYQADHGAQAVQIFDSWATELSPVDFEEFSLPYLKQIVEAVKLTHPDLPLILYASGSGGLLERLPLTGVDVVSLDWTVDMADGRRRLGPNVAIQGNVDPGVLFGSKEFITNRINDTVKKAGKGKHILNLGHGIKVGTPEENVAHFFEVAKGLRY

SEQ ID NO: 485 - DNA, 1017 bp, Selaginella moellendorffii
atgatgcgtcaggccgggcgatacatggcagcgtatcgcaaattggcagacaagcatccctccttccgcaagagatccgaggagacggatcttatcgtcgagatttcgctgcagccctggaaagcattcatgcccgacggcgtcatcatcttctccgacatcctcactccactccccgcgattggagtggagtttgagatcgatgacgccaaaggcccgatcatcagcgacccagtcgtgtcggtggagcgagcatcgcagctgcattccatcgatctctcacgcctcgagttcgtcggcgactcgttgagaactcttcgaagagaggtagggaatggagctgctgttcttggattcgtcggtgcgccgtggacgctggcaacttatctcatcgagggccgctccactcgaacttacaagaagatcaaaggcatgtgttacgagaatccggagctgctcgagtcgatactcgaccaccttgcaaatgcgatcggggactacctcgtgtttcagatacaatccggtgctcagtgcgtccaaatatttgattcctggggtggccaacttacgccagttcaatgggatcgctggtcaaaaccgtatatttgcaagatgatcaggactgtcaaggacaagtgtcctggagttccgatcgtcctctatgcgaatggaaacgggggcctcctggaaagaatgagtgacaccggagctcatgtcatcggcctggattggacagtagacatgctggatggtcgaaagaggctgggagattccgtggctgtccagggaaatgtggatccctgcgttcttttcggtccggaatggtcgatcaccgaagccgtggtcgacgtcgtgagaaaggctggaaacaagggtcacatcctcaatctgggacacggcgtcttggttggcaccccggaagagagtgtcgcacatttttttcaaacggcacggagcctgtcgctggacaagctgggctctttatctgcacaatttgcagcagcagcagcatcgtga

SEQ ID NO: 486 - protein, 338 aa, Selaginella moellendorffii
MMRQAGRYMAAYRKLADKHPSFRKRSEETDLIVEISLQPWKAFMPDGVIIFSDILTPLPAIGVEFEIDDAKGPIISDPVVSVERASQLHSIDLSRLEFVGDSLRTLRREVGNGAAVLGFVGAPWTLATYLIEGRSTRTYKKIKGMCYENPELLESILDHLANAIGDYLVFQIQSGAQCVQIFDSWGGQLTPVQWDRWSKPYICKMIRTVKDKCPGVPIVLYANGNGGLLERMSDTGAHVIGLDWTVDMLDGRKRLGDSVAVQGNVDPCVLFGPEWSITEAVVDVVRKAGNKGHILNLGHGVLVGTPEESVAHFFQTARSLSLDKLGSLSAQFAAAAAS

SEQ ID NO: 487 - DNA, 1182 bp, Selaginella moellendorffii
atggcgacgacgtctggatgcttggtcgggcaatgcaggcccggcgcggccgctgttcaatggaattcctcgcgcccatcgaggatccagtgctccgtcgtggcggatgcggctacagcgacggattcacagcaggagctccgggcaggcgcagatcctttgttgctacgagcagtgcgcggcgacagcgtcgagaggcctcccgtgtggatgatgcggcaagccgggaggtacatgaagtcttatcaagacctctgtgccaaatatccttcttttagagagcgatcagagaatgcggagcttgccattgagatctcgctccagccatggaaggcttttaggccagatggtgtgattttgttctcggacatcttgacacccttgacgggaatgaacattccatttgatatcctagccgggaagggacccgttatacacaaaccgatcacatccatggccgatgtagacgaagttacggagctctgtcccgaggaggccgtcccttacgttggacaagctctatcctctctcagagctgaagtgggcaatgaggctgctgtgctgggctttgttggcgcaccattcacactagcctcgtatatcatagaaggaggctcatccaagcatttcgcgaagataaaaagactagcctttggcagccctgagattttacacgctttgctcaagaaactggccgagtccataatcatctacgtgcgttaccaggcagacaagggagctcaaaccgtccaaatcttcgactcgtgggccacgcacctaagcccgatcgatttcgagcaattcagcctgccatatctcaagcagatagtgtccgaggtgaagaaaactcacccgtcgctaccattgatcctctacgccagcggcagcggcggcctcctcgagaggctggggtcgtccggagtggacatcgtgagcgtggactggacagtggacatggccgaggcgaggcaaagattaggcagggacgtagcggtgcaaggcaacatagaccccggcgccttgtttggctccaaggattttatccggcaaagagttatcgacaccgtggccagggctggccgaggaaagcacattctaaaccttggccatggagtgttggttgggacgcccgaggagaacgtagctcacttcttcgaagttggaaaaagcattcgatattga

SEQ ID NO: 488 - protein, 393 aa, Selaginella moellendorffii
MATTSGCLVGQCRPGAAAVQWNSSRPSRIQCSVVADAATATDSQQELRAGADPLLLRAVRGDSVERPPVWMMRQAGRYMKSYQDLCAKYPSFRERSENAELAIEISLQPWKAFRPDGVILFSDILTPLTGMNIPFDILAGKGPVIHKPITSMADVDEVTELCPEEAVPYVGQALSSLRAEVGNEAAVLGFVGAPFTLASYIIEGGSSKHFAKIKRLAFGSPEILHALLKKLAESIIIYVRYQADKGAQTVQIFDSWATHLSPIDFEQFSLPYLKQIVSEVKKTHPSLPLILYASGSGGLLERLGSSGVDIVSVDWTVDMAEARQRLGRDVAVQGNIDPGALFGSKDFIRQRVIDTVARAGRGKHILNLGHGVLVGTPEENVAHFFEVGKSIRY

SEQ ID NO: 489 - DNA, 699 bp, Saccharum officinarum
atgatgcccccgacggccaccgcgatggccgtcgtcctctccgcggcggccccctctttctccacccgccgtcggcgcagccgccttcctgccatctccgcatctctttcgccgtcctcctcctcctcttcctcctccgaggagccgctgctggtgcgcgcagcgcggggcgaggacggcctcccgcgcccgcccgcgtggatgatgcggcaggcagggcgatacatggcggagtaccaggcgctggccaagcgccacccgtcgttccgggagcgctccgagaacacggacctcatcgtcgagatcacgctgcagccgtggcgtgccttcgcgcccgacggcgtcatcctgttctcggacatactcacgcccctaccggctatcggggtgccgttcgatatctcggactccaagggacccgtgatccaatcgccagtgcggtccgaagagcaagtgagggagctcgtccccatcgaccttgatatgctccagttcgtcggggagtcactaaagattctgcggaatgagattgatggaaaagctgctctgctaggatttgtgggggccccatggacaattgcaacttatgttgttgaaggggggatgaccaacacatacacaaatataaagagcatgtgtcatacagcttcagatgtcttgagggggcttctatctcacccttgcacaaccaatatctga

SEQ ID NO: 490 - protein, 232 aa, Saccharum officinarum
MMPPTATAMAVVLSAAAPSFSTRRRRSRLPAISASLSPSSSSSSSSEEPLLVRAARGEDGLPRPPAWMMRQAGRYMAEYQALAKRHPSFRERSENTDLIVEITLQPWRAFAPDGVILFSDILTPLPAIGVPFDISDSKGPVIQSPVRSEEQVRELVPIDLDMLQFVGESLKILRNEIDGKAALLGFVGAPWTIATYVVEGGMTNTYTNIKSMCHTASDVLRGLLSHPCTTNI

SEQ ID NO: 491 - DNA, 1263 bp, Solanum tuberosum
atggctatggttttttctccattaacatcaagtgggtgtagtagttattgcaatcttggattaagctggaaatcgtcgagcttgtttgtggaattagggtttctttcaaatgggtcaaaaggggtttctgctaaacccgcaaagctcaatgctagtaaagtttttcgggcttgtgcttcttcttcttcctctgatccacttttggtgaaggctgcaagaagagaacaggtgagtcgcccgcctgcatggatgatgcgtcaagcgggaaggtatatggctgtttacagaaagcttgcggagaaacatccatccttcagagagagatcagagacaactgatctcattgtggaaatttctttgcagccctgggaagcttttcatccagatggagtaatcatcttttcggacatacttaccccactacctgcatttggtgtccaatttgacattgaagatgtaagaggcccagtcattcagtctcccattcgttctgaagagggattgaaatcattgcactctattgacttggagaaactacaatttgtgggagactcacttaggattttgaggaaggaggttggagagcaagctgcaattttgggttttgtcggagctccttggacaattgctacctacatagttgaaggtggtacaactcgtacgtatacgaagattaaggacatgtgccataccgctcctcatgttttgagagctttgttatctcatttatcaaaagcaattgctgagtatattgtgtatcaagtggagtctggagctcattgcatccaaatatttgattcatggggtggacaactcccacctcatatgtgggactgctggtcaaagccttatattgatgagatagttggtataattaaaagaaagtgcccacaaacacctcttgtgctctacattaacggaaatggtgggcttcttgaacggatgaaaacaactggagttgatgtaattggacttgactggacagtggatatggcagatggaaggaggcgactaggaacagatattggtatacaggggaatgtggatcccgctaccttgttttgtcctcttcctgcattgacagatgaaattaaaagggttgtcaagagtgcagggactagtggtcacatcctcaatcttggccacggtgtgctcgtgggtacacctgaagaagccgtagctcacttctttgatgttgctaagagcttcgattttgacaaggttgaggatcatgtatctgaggcagacaaagttgtagcttga

SEQ ID NO: 492 - protein, 420 aa, Solanum tuberosum
MAMVFSPLTSSGCSSYCNLGLSWKSSSLFVELGFLSNGSKGVSAKPAKLNASKVFRACASSSSSDPLLVKAARREQVSRPPAWMMRQAGRYMAVYRKLAEKHPSFRERSETTDLIVEISLQPWEAFHPDGVIIFSDILTPLPAFGVQFDIEDVRGPVIQSPIRSEEGLKSLHSIDLEKLQFVGDSLRILRKEVGEQAAILGFVGAPWTIATYIVEGGTTRTYTKIKDMCHTAPHVLRALLSHLSKAIAEYIVYQVESGAHCIQIFDSWGGQLPPHMWDCWSKPYIDEIVGIIKRKCPQTPLVLYINGNGGLLERMKTTGVDVIGLDWTVDMADGRRRLGTDIGIQGNVDPATLFCPLPALTDEIKRVVKSAGTSGHILNLGHGVLVGTPEEAVAHFFDVAKSFDFDKVEDHVSEADKVVA

SEQ ID NO: 493 - DNA, 531 bp, Triticum aestivum
atgatgcggcaggctgggcggtacatggcgtcgtaccaggcgctgtccaagcgccacccttcgttccgggagcggtcggagaccaccgacctcatcgtcgaaatcacgctacagccgtggcacgccttcgcacccgacggcgtcatcctattctcggacatactcacgcccctgccggccatcggggtgccgttcgatatctcggaatccaaggggccggtgatccagtctcccgtgcggacggaggaacaggtcagggagctcgttcccatagatctcgataagctccagttcgtcggggagtcgctcaagattctgcgcagcgagattgatggaaaagctgctttgctaggattcgtgggggccccatggacaattgcaacttatgttgttgaaggagggatgaccaacacttacacaaatataaatggaaatggaggcttgctcgagcgcatgaaggacatcggagttgatgttattgggcttgactggacagtggatatggcagatggaaggaggcgccgttggtga

SEQ ID NO: 494 - protein, 176 aa, Triticum aestivum
MMRQAGRYMASYQALSKRHPSFRERSETTDLIVEITLQPWHAFAPDGVILFSDILTPLPAIGVPFDISESKGPVIQSPVRTEEQVRELVPIDLDKLQFVGESLKILRSEIDGKAALLGFVGAPWTIATYVVEGGMTNTYTNINGNGGLLERMKDIGVDVIGLDWTVDMADGRRRRW

SEQ ID NO: 495 - DNA, 1212 bp, Thalassiosira pseudonana
atgaaggtcgtccaacatctcctctccatcggcctactatcaacagcggtggccttcacgcccgccaccacctctcgctcgcccaccgccctccattcgtccacagaagcagtcgttgaatccacagccaatggtgtaaacaagggagaccgcgacatcctcgtccgctgtgcctccgggcagcaagttgaacgtacgcccgtctggctcatgcgtcaagctggtcgttacatgtctgcgtttcgtcaatactctgacaaatatccctttcgtgagcgtagtgagactccctcaatggccattgaattgagtttgcaatgtcatcgtgcatacggaatggatgggattatcatgttctctgatatcttgactccgttgcctacgttgggaattgagtttgacgttgtcaaggggcttgggccggtgatttcaacggaggtacgaactgaggcggatgttgccaagttgaaggatgttgagagtgtgaactttgatgagacattgccattcatccgtgagattttgggatcattatccaaggaggcagaggaagcaaatacgtcattgattggatttgttggagctccgtttacgttggctgcttacactattgaggggaaatcctccaagcactgcttatccacaaagaagatgatgatggctgacgaggatggatcttccaaggctgtttcacagttcttggacaaactcgccgtaatgattggaaactatgcatgccatcaaatagaatgcggagctcaggtcattcaggtgtttgaatcatgggcgcaccaattgagccctcgtcagtttgaagcatttgcaaagccagcagcacaaaaggccattcgtatcattaaggagaagtaccccgatgtgcccgtgatttattttgccaatggaggatcgtcgtacttggaacttcagaaggatatgggatgtgatatgattgccgttgactggtctgttgatatgaaagaggctcgtaagatccttggtcctgatattccaatctctggaaacattgatcctaccatcttgtttggcacgaaagaacaaatcgagcaggctgtgagagattgcattgataaggccggaggacctggaaagcatttgttaaacttgggacatggagttatgcagggtactcctgaggaggctgttggatggttggtggatgagtgcaaacgttacaggggacagaatgcgtaa

SEQ ID NO: 496 - protein, 403 aa, Thalassiosira pseudonana
MKVVQHLLSIGLLSTAVAFTPATTSRSPTALHSSTEAVVESTANGVNKGDRDILVRCASGQQVERTPVWLMRQAGRYMSAFRQYSDKYPFRERSETPSMAIELSLQCHRAYGMDGIIMFSDILTPLPTLGIEFDVVKGLGPVISTEVRTEADVAKLKDVESVNFDETLPFIREILGSLSKEAEEANTSLIGFVGAPFTLAAYTIEGKSSKHCLSTKKMMMADEDGSSKAVSQFLDKLAVMIGNYACHQIECGAQVIQVFESWAHQLSPRQFEAFAKPAAQKAIRIIKEKYPDVPVIYFANGGSSYLELQKDMGCDMIAVDWSVDMKEARKILGPDIPISGNIDPTILFGTKEQIEQAVRDCIDKAGGPGKHLLNLGHGVMQGTPEEAVGWLVDECKRYRGQNA

SEQ ID NO: 497 - DNA, 1179 bp, Triphysaria sp.
atggcgtgcatttatagcagctcagtttcatcaatctctacaaaattgaatttcgcgcctctctctaatcataaacccaaattctattgctctatcggaggtgccgttgcggagccaaaagctgtaaatgttaccgagcctctgttacttaacgccgcacggggcaaagaagtagacagacccccggtttggcttatgagacaagcagggaggtacatgaagagttaccaaactctgtgcgaaaaatatccatccttccgtgaaagatcggaaaatgttgatcttgtggtggaaatttcacttcagccgtggaaagtgtttaaacccgatggcgtcatattattctctgatattcttacccctttgtccggtatgaacatacctttcgacattgtcaaaggtaagggtcccataatattcgatccgattcggacaactggcgatgttgaaaaagtgagagaattcactcccgatgagtcggttccgtatgttggtgaagctctaacgatcttgcgcaaagaggtaaacaatgaagcggcagtgctcggttttgttggagctcctttcacgctggcttcttatgttgttgaaggaggttcctcgaaacacttctcgaaaataaaaagactggctttttcggagcccaaggtccttcatgcactacttcaaaaatttgctacctccatggccaaatacattcagtaccaagccgacaaaggggcccaagctgtccagattttcgattcgtgggccactgaactcagcccggtcgatttcgaagagttcagcctcccttacctgaagcaaattgtcgataccataaaacggacccacccgactctcccgctcatactctatgcaagtgggtcaggtggattaatcgagagactaaccttgacgggcgttgatgtggttagcttggattggacggtcgatatggccgaaggtagaaaacggcttggccctaatgtagccattcagggtaatgtggaccccggtgttctttttggttcgaaagagttcattaccgagaggatcaaggataccgttaggaaagctggaaaagggaaacatattttgaatcttggacatgggattgttgtgggtacgcctgaagaaaacgtggctcatttttttgaggttgctaaggggcttaggtattcagattttgatttttaa

SEQ ID NO: 498 - protein, 392 aa, Triphysaria sp.
MACIYSSSVSSISTKLNFAPLSNHKPKFYCSIGGAVAEPKAVNVTEPLLLNAARGKEVDRPPVWLMRQAGRYMKSYQTLCEKYPSFRERSENVDLVVEISLQPWKVFKPDGVILFSDILTPLSGMNIPFDIVKGKGPIIFDPIRTTGDVEKVREFTPDESVPYVGEALTILRKEVNNEAAVLGFVGAPFTLASYVVEGGSSKHFSKIKRLAFSEPKVLHALLQKFATSMAKYIQYQADKGAQAVQIFDSWATELSPVDFEEFSLPYLKQIVDTIKRTHPTLPLILYASGSGGLIERLTLTGVDVVSLDWTVDMAEGRKRLGPNVAIQGNVDPGVLFGSKEFITERIKDTVRKAGKGKHILNLGHGIVVGTPEENVAHFFEVAKGLRYSDFDF

SEQ ID NO: 499 - DNA, 1236 bp, Volvox carteri
atgcaatccagcacaatgcggcaagcggcgagctcccagcgctgcagcggacagccgtttaagccgaaccagactgcaccgcgtgcacggatttgcagcatggcttgtcaggcggctggtgcgcaagatccactgttgctgcgcgttgcaaggggcgaagatgctgagaggacgccggtgtggctgatgcggcaggcgggtcgctacatggctgccttcagggagttttcggacaagtaccccttccggatgcgctccgagacccccgacatcgccatcgagctctccttgcagccgctgcgcgccttccgccccgatggcatcattttcttttcggacatcctcacgccgctgcctggcatgggcattgagtttgacatggttaagggcaagggccccgtcatcgccaacccagttcggtccgcagaacatctgcggcaacttgtgccgctctccgaccccgcctcccggctacccttcatccagaagattctatccaccttgcgacaggaggccgactccgagggggtgacgctgctgggcttcatcggtaccccctggactctggcggcctatgccatggagggcaaggcggacaaggactgcaaggaaaccaaggtgtggaaaataatgttccacaatccagcgttgttgcactcgttcctggacttcctaaccgagcagttgattgtctacgccggctaccagattgagagcggcgcgcaggtgatccagctgtttgacagctgggcgcaccacctgtcgccggcgcagtttgccgagttcagcatgccgtacgcagagcgcatcacgcgcgcgctcaaggccaagtacccgcatgtcccggtgattttccacgccaacggcggcacgggcaagctggagctgatgaaggagacggcggctgatgtggtgggtctggattgggcggtggacatgaaggacgccagggccaccctcggacatggcgtcaaagtgcagggcaatgttgatcccatgtcgctgttcggtccggaagagcacatccgcgtcgaggtggagcgctgcttgagggccgctggaccccgaggacacatcctcaacgtggggcatggtgtcgtacagggcactccggagtcctctgtggcgttgttctgcgagctcgctcgtcagtcggggcaaatacacgccaagaccgccccagctgcaacagctgctactgccagcagcggagtccgggcgccggtgttggcatag

SEQ ID NO: 500 - protein, 411 aa, Volvox carteri
MQSSTMRQAASSQRCSGQPFKPNQTAPRARICSMACQAAGAQDPLLLRVARGEDAERTPVWLMRQAGRYMAAFREFSDKYPFRMRSETPDIAIELSLQPLRAFRPDGIIFFSDILTPLPGMGIEFDMVKGKGPVIANPVRSAEHLRQLVPLSDPASRLPFIQKILSTLRQEADSEGVTLLGFIGTPWTLAAYAMEGKADKDCKETKVWKIMFHNPALLHSFLDFLTEQLIVYAGYQIESGAQVIQLFDSWAHHLSPAQFAEFSMPYAERITRALKAKYPHVPVIFHANGGTGKLELMKETAADVVGLDWAVDMKDARATLGHGVKVQGNVDPMSLFGPEEHIRVEVERCLRAAGPRGHILNVGHGVVQGTPESSVALFCELARQSGQIHAKTAPAATAATASSGVRAPVLA

SEQ ID NO: 501 - DNA, 1173 bp, Volvox carteri
atgcagaccaaggctttcacctcggcgcggccgcagcgtatggctgcgcttaaggcccagcgtgcccccgcggtgactgtgcgtgccgccgctgctccagctgtggcccctgcaccggcctccagctccagtgtcgatgagccactgatgctgcgcgccctgcgcggtgagaaggtggagcggccgccggtgtggatgatgcgccaggccggccgctaccaaaaggtgtaccaggacctctgcaagaagcaccccacgttccgcgagcgctcggagcgcgttgaccttgctgtggagatttctctgcagccctggcacgcgttcaagcccgatggcgtcattctgttctcggacatcctgaccccgctgccgggcatgaacatccccttcgacatggctcccggccccatcattatggaccctattcgcactatggcgcaagtagagaaggtgacgaagctggacgcggacgccgcctgccccttcgtcggcgagtctctgcgccagctgcgctcgtacatcggcaaccaggccactctgctgggcttcgtgggtgcgcccttcaccctggcgacgtacattgtcgagggcggctcgtccaagaactttgcgcacattaagaagatggccttctccactccggaagtgttgcacgcgctgctggacaagctggcggacaatgtggccgactacgtgcgctaccaggccgacgcgggtgctcaggtggtgcagattttcgatagctgggcttcggagttgcagccccaggacttcgacgtgttctccgggccgtacatcaagaaggtgatcgacagcgtccgcaagacacaccccaacctccctatcatcctttacatctcaggctcgggcggtctgcttgagcgcatggctgccgcgcagcccgacatcatctctctggaccagtcggtggacttcacagacggcgtgaagcgatgcggcgccaactttgccttccagggcaacatggaccccggcgtgctgttcggctccaaggacttcatcgagacgcgcgtcatggatacaatcaaggccgcccgatctgctggcgtgcgccacattatgaaccttgggcatggtgtgctgccaggcactccagaggaccacgtgggccacttcttccacgtcgcccggaccgcccacgagcgcatgtaa

SEQ ID NO: 502 - protein, 390 aa, Volvox carteri
MQTKAFTSARPQRMAALKAQRAPAVTVRAAAAPAVAPAPASSSSVDEPLMLRALRGEKVERPPVWMMRQAGRYQKVYQDLCKKHPTFRERSERVDLAVEISLQPWHAFKPDGVILFSDILTPLPGMNIPFDMAPGPIIMDPIRTMAQVEKVTKLDADAACPFVGESLRQLRSYIGNQATLLGFVGAPFTLATYIVEGGSSKNFAHIKKMAFSTPEVLHALLDKLADNVADYVRYQADAGAQVVQIFDSWASELQPQDFDVFSGPYIKKVIDSVRKTHPNLPIILYISGSGGLLERMAAAQPDIISLDQSVDFTDGVKRCGANFAFQGNMDPGVLFGSKDFIETRVMDTIKAARSAGVRHIMNLGHGVLPGTPEDHVGHFFHVARTAHERM

SEQ ID NO: 503 - DNA, 1188 bp, Volvox carteri
atgactggaaaaacgattttgcgttccgatggcatttgccgcagcgccgttcttaggcatcttgcgttcaagcctatcgccgtaggcatgtcgcgagcgacagcggtagttgttaaagcacagccagctgcaggcggcatgcaagatccgctcatggttcgcgctgcgcgtggcgaaaaagttgagcgtgctccctgctggatgatgcggcaagctggccgctatcaaaaatcgtatcgggagctggcgaagaaacatccgtcttttcgtgagcgttctgagacaactgagctgatcgtggagatcagcttacagccctggaattccttcaggccagatggcgtcattttgtttagcgacattcttacacctcttccggggatcggtgtcaactttgacatcgacgataacaaggggccgattattgatacccccatccgtagcctggagcaagtgaagcagctgcacgaaatggatttcggcaaggtggacttcgtgggcagggcattgacccagctccgggcagaggtgaacaaccaagcggcggtgctgggcttcgtgggctccccgtggacgttagccacgtacctgattgagggtggttccacgtcgctatataagaccattaagacgatgtgcttttctgcgccagacgtcctggacgccttgctgaccaagctggcggatgctatggctgcgtacatcaagtaccagatccgtgcgggcgcccagtgcgtgcagatttttgactcgtggggtgggcagctcccaccccgggagtgggagaagtggagcggaccgtatctgaagcgcatcattgcatcggtgaaagctgagtatcccacagtgccgctgacgctctatgcgaacggttcgggcggcctcttggaacgcttggcggcaacgggcgcggacgtggttggcgttgactggacgacggacatgtcggacgcgcggcgtcggatagatagcaatgtatcggtgcagggcaacgtggaccccgctatcctctttgcatcgaaggatgctattgaggatgccgtgcgggattgcctgcgcaaggcggggggcaatcgccacatcctcaacctgggccacggagtcttggtgggcacgcccgaggagggagtcgcgcacatgttcgatctgtcgaaacgcttgacatacgccgacgttgctcagatctga

SEQ ID NO: 504 - protein, 395 aa, Volvox carteri
MTGKTILRSDGICRSAVLRHLAFKPIAVGMSRATAVVVKAQPAAGGMQDPLMVRAARGEKVERAPCWMMRQAGRYQKSYRELAKKHPSFRERSETTELIVEISLQPWNSFRPDGVILFSDILTPLPGIGVNFDIDDNKGPIIDTPIRSLEQVKQLHEMDFGKVDFVGRALTQLRAEVNNQAAVLGFVGSPWTLATYLIEGGSTSLYKTIKTMCFSAPDVLDALLTKLADAMAAYIKYQIRAGAQCVQIFDSWGGQLPPREWEKWSGPYLKRIIASVKAEYPTVPLTLYANGSGGLLERLAATGADVVGVDWTTDMSDARRRIDSNVSVQGNVDPAILFASKDAIEDAVRDCLRKAGGNRHILNLGHGVLVGTPEEGVAHMFDLSKRLTYADVAQI

SEQ ID NO: 505 - DNA, 1206 bp, Vitis vinifera
atgtgttgctgtctcggctggagctcttcctcctccgtacaactagggtttcttcccgccagattttttcgcgtttcttccagaccaaccaaaagatttcatttcaaatgctcttcttcggttcctgattctgatccactcttggttaaggctgcaagaggggaccctgttactcggcctccagcatggatgatgcgccaagccggaaggtacatggctgtttacagaaagcttgcagagaaatacccatccttcagacagaggtcagagacaactgatctcattgtggaaatttctttgcagccttgggaagctttccaccctgatggtgttatcattttctccgacatacttacacctttacctgcatttggtgtcccatttgacatagaggaagtgaggggccctgttattcattctccaattcgctctgaagaaggcttgaaagtattgcatcccatagacttaaagaagcttcattttgtgggagaatcactaagaattttgcggcaggaggtggggggacaagctgctgttctgggttttgtaggagcaccttggacaattgggacatatatagtggaaggcggtacaactcgaacatatacgatcataaaaagcatgtgtcatacagcaccaaatgtattgagggctcttctttctcatttaacacaggcaatatctgaatacattgttttccaagttgaatccggggcccattgtatacaaatatttgattcttggggtggtcaactaccgcctgatatgtgggagtgctggtcaaaaccttatattgaagagatggtgagtgttgtaaggaaaaggtgccctggaactccaattgttctctacattaatggaaatggtggccttcttgagcgaatgaaaggaactggggtcgatgtgattggacttgactggacggtggatatggctgatggaagaaagcgattggggagtggaatcagtatacagggaaatgtggatcctgcttatttattttctcctcttcctgccttgactgatgaaattcaaagggttgtgaggtgtgcaggaccaaggggccacattcttaatttaggtcacggcgttcttgttgggacacctgaagaagctgttgcacatttctttgaagttgcaagaaacttgaaccttagtacactgcttgaagacaatgcagtggaggaacctaaattggctgtttga

SEQ ID NO: 506 - protein, 401 aa, Vitis vinifera
MCCCLGWSSSSSVQLGFLPARFFRVSSRPTKRFHFKCSSSVPDSDPLLVKAARGDPVTRPPAWMMRQAGRYMAVYRKLAEKYPSFRQRSETTDLIVEISLQPWEAFHPDGVIIFSDILTPLPAFGVPFDIEEVRGPVIHSPIRSEEGLKVLHPIDLKKLHFVGESLRILRQEVGGQAAVLGFVGAPWTIGTYIVEGGTTRTYTIIKSMCHTAPNVLRALLSHLTQAISEYIVFQVESGAHCIQIFDSWGGQLPPDMWECWSKPYIEEMVSVVRKRCPGTPIVLYINGNGGLLERMKGTGVDVIGLDWTVDMADGRKRLGSGISIQGNVDPAYLFSPLPALTDEIQRVVRCAGPRGHILNLGHGVLVGTPEEAVAHFFEVARNLNLSTLLEDNAVEEPKLAV

SEQ ID NO: 507 - DNA, 734 bp, Zea mays
agcagatactgagctttattcagtgggagtcatcagtgttataccataagacagtgcagatacatagcaacaccatgaagttggtaatacatgaaagcaagaaaagtaaggaagagtcacctgtttgatatatggttttgaccactgctcccacacatgaggtggaagctgtccaccccatgaatcaaatatctgtatacactgggccctcgagttaacttggtaaatgatatagtcagatatggcttgtgcaaggtgagagagaagacccttcaagacatctggagctgtatggcacatgctctttatatttgtgtacgtgttggtcatccccccttcaacaatgtaagttgcaattgtccatggggcccccacaaatcctagcaaagcagcttttccatcaatctcatttcgcagaatctttagtgactccccgacgaactggagcatatcaaggtcgatggggacgagctccctcacctgctctttggaccgtactggcgattggatcacgggccccttggagtccgagatatcgaacggcaccccgatggccggcaggggcgtgagtatgtccgagaacaggatgacgccgtcgggcgcgaaggcacgccacggctgcagcgtgatctcgacgatgaggtccgtgttctcggagcgctcccggaacgaggggtggcgcttggccagcgcctggtactccgccatgtaccgccctgcctgccgcatcatcc

SEQ ID NO: 508 - protein, 238 aa, Zea mays
MMRQAGRYMAEYQALAKRHPSFRERSENTDLIVEITLQPWRAFAPDGVILFSDILTPLPAIGVPFDISDSKGPVIQSPVRSKEQVRELVPIDLDMLQFVGESLKILRNEIDGKAALLGFVGAPWTIATYIVEGGMTNTYTNIKSMCHTAPDVLKGLLSHLAQAISDYIIYQVNSRAQCIQIFDSWGGQLPPHVWEQWSKPYIKQVTLPYFSCFHVLPTSWCCYVSALSYGITLMTPTE

SEQ ID NO: 509 - DNA, 1203 bp, Zea mays
atgatgctcccgacggccaccgcgacggccgtcttcctcaccgcggcgccttcctctttctccacccgccgtcggcgcagtcgcgccatcttcgcatccctttcgccgtccttctccgcctcggaggagccgctgctggtgcgcgcggcgcggggcgaggacggcctcccacgcccgcccgcgtggatgatgcggcaggcagggcggtacatggcggagtaccaggcgctggccaagcgccacccctcgttccgggagcgctccgagaacacggacctcatcgtcgagatcacgctgcagccgtggcgtgccttcgcgcccgacggcgtcatcctgttctcggacatactcacgcccctgccggccatcggggtgccgttcgatatctcggactccaaggggcccgtgatccaatcgccagtacggtccaaagagcaggtgagggagctcgtccccatcgaccttgatatgctccagttcgtcggggagtcactaaagattctgcgaaatgagattgatggaaaagctgctttgctaggatttgtgggggccccatggacaattgcaacttacattgttgaaggggggatgaccaacacgtacacaaatataaagagcatgtgccatacagctccagatgtcttgaagggtcttctctctcaccttgcacaagccatatctgactatatcatttaccaagttaactcgggggcccagtgtatacagatatttgattcatggggtggacagcttccacctcatgtgtgggagcagtggtcaaaaccatatatcaaacagattgtgagtaggattaagaaagagtgccctcatgtaccccttgtgttgtatataaatggaaatggaggtttacttgagcgcatgaaggacacaagagttgatgttattgggcttgactggacagtggacatggctgatggaaggaagcgccttggtaatggaattagtgtacaagggaatgtggatccagcatttctgttctcaccattaccagtactgactgatgaaattcgtagggttgtgaaagcagctggtacaaaaggtcatatacttaacttgggccacggtgtacttcagaaaacacccgaagaagctgtagcacatttctttgatgtcacaaggagcttgagatatgacacccatttccaaggttctgttgctgaaggattgcagcctgttgcttga

SEQ ID NO: 510 - protein, 400 aa, Zea mays
MMLPTATATAVFLTAAPSSFSTRRRRSRAIFASLSPSFSASEEPLLVRAARGEDGLPRPPAWMMRQAGRYMAEYQALAKRHPSFRERSENTDLIVEITLQPWRAFAPDGVILFSDILTPLPAIGVPFDISDSKGPVIQSPVRSKEQVRELVPIDLDMLQFVGESLKILRNEIDGKAALLGFVGAPWTIATYIVEGGMTNTYTNIKSMCHTAPDVLKGLLSHLAQAISDYIIYQVNSGAQCIQIFDSWGGQLPPHVWEQWSKPYIKQIVSRIKKECPHVPLVLYINGNGGLLERMKDTRVDVIGLDWTVDMADGRKRLGNGISVQGNVDPAFLFSPLPVLTDEIRRVVKAAGTKGHILNLGHGVLQKTPEEAVAHFFDVTRSLRYDTHFQGSVAEGLQPVA

SEQ ID NO: 511 - DNA, 876 bp, Zea mays
atgcccgtcttcctctccgcggcgccccctcctttttccacccgccgtcggcgcagccgccttcctgccatttccgcatccctttcgccgtccccttcctcttcggaggagccgctgctggtgcgcgcggcgcggggcgaggacggcctcccacgcccacccgcgtggatgatgcgacaggcagggcggtacatggcggagtaccaggcgctggccaagcgccacccctcgttccgggagcgctccgagaacacggacctcatcgtcgagatcacgctgcagccgtggcgtgccttcgcgcctgacggcgtcatcctgttctcagacatactcacgcccctaccggccatcggggtaccgttcgatatctcggactccaaggggcccgtgatccaatcgccagtgcggtccgaagggcaggtgagggagctcgtccccatcgaccttgatatgctccagttcgtcggagagtcactaaagattctgcgaaatgagattgatggaaaagctgctttgctaggatttgtgggggccccatggacaattgcaacttacattgttgaaggggggatgaccaacacatacacaaatataaagaacatgtgccatacagctcccgatgtcttgaggtgtcttctatctcatcttgcagaagcgatatctgactatatcatttaccaagttaactccggggcccagtgtatacagatatttgattcatggggtggacaacttccacctcatgtgtgggagcagtggtcaaaaccatatatcaaaaagtggacatggctgatggaaggaagcgccttggtaatggaattagtgtccaagggaatgtggatccagcatttctgttctcaccattaccagtactga

SEQ ID NO: 512 - protein, 291 aa, Zea mays
MPVFLSAAPPPFSTRRRRSRLPAISASLSPSPSSSEEPLLVRAARGEDGLPRPPAWMMRQAGRYMAEYQALAKRHPSFRERSENTDLIVEITLQPWRAFAPDGVILFSDILTPLPAIGVPFDISDSKGPVIQSPVRSEGQVRELVPIDLDMLQFVGESLKILRNEIDGKAALLGFVGAPWTIATYIVEGGMTNTYTNIKNMCHTAPDVLRCLLSHLAEAISDYIIYQVNSGAQCIQIFDSWGGQLPPHVWEQWSKPYIKKWTWLMEGSALVMELVSKGMWIQHFCSHHYQY

SEQ ID NO: 513 - DNA, 1203 bp, Zea mays
atgatgctcccgacggccaccgcgacggccgtcttcctcaccgcggcgccttcctctttctccacccgccgtcggcgcagtcgcgccatcttcgcatccctttcgccgtccttctccgcctcggaggagccgctgctggtgcgcgcggcgcggggcgaggacggcctcccacgcccgcccgcgtggatgatgcggcaggcagggcggtacatggcggagtaccaggcgctggccaagcgccacccctcgttccgggagcgctccgagaacacggacctcatcgtcgagatcacgctgcagccgtggcgtgccttcgcgcccgacggcgtcatcctgttctcggacatactcacgcccctgccggccatcggggtgccgttcgatatctcggactccaaggggcccgtgatccaatcgccagtacggtccaaagagcaggtgagggagctcgtccccatcgaccttgatatgctccagttcgtcggggagtcactaaagattctgcgaaatgagattgatggaaaagctgctttgctaggatttgtgggggccccatggacaattgcaacttacattgttgaaggggggatgaccaacacgtacacaaatataaagagcatgtgccatacagctccagatgtcttgaagggtcttctctctcaccttgcacaagccatatctgactatatcatttaccaagttaactcgagggcccagtgtatacagatatttgattcatggggtggacagcttccacctcatgtgtgggagcagtggtcaaaaccatatatcaaacagattgtgagtaggattaagaaagagtgccctaatgtaccccttgtgttgtatataaatggaaatggaggtttacttgagcgcatgaagaacacaggagttgatgttattgggcttgactggacagtggacatgactgatggaaggaggcgccttggtaatggcattagtgtacaagggaatgtggatccagcatttttgttctcaccattaccagtactgactgatgaaattcatagggttgtgaaagcagctggtccaaaaggtcatatacttaatctgggccatggtgtacttcagaaaacacccgaagaagctgtagcacatttctttgatgtcacaaggcgcttgagatatgacacccttttccaaggttctgttgctgaagaattgcatcacgttgcttga

SEQ ID NO: 514 - protein, 400 aa, Zea mays
MMLPTATATAVFLTAAPSSFSTRRRRSRAIFASLSPSFSASEEPLLVRAARGEDGLPRPPAWMMRQAGRYMAEYQALAKRHPSFRERSENTDLIVEITLQPWRAFAPDGVILFSDILTPLPAIGVPFDISDSKGPVIQSPVRSKEQVRELVPIDLDMLQFVGESLKILRNEIDGKAALLGFVGAPWTIATYIVEGGMTNTYTNIKSMCHTAPDVLKGLLSHLAQAISDYIIYQVNSRAQCIQIFDSWGGQLPPHVWEQWSKPYIKQIVSRIKKECPNVPLVLYINGNGGLLERMKNTGVDVIGLDWTVDMTDGRRRLGNGISVQGNVDPAFLFSPLPVLTDEIHRVVKAAGPKGHILNLGHGVLQKTPEEAVAHFFDVTRRLRYDTLFQGSVAEELHHVA

SEQ ID NO: 515 - protein, 29 aa, artificial sequence
  motif 13
  VARIANT (8)..(8): / replace = "Leu"
  VARIANT (16)..(16): / replace = "Leu"
  VARIANT (17)..(17): / replace = "Pro" / replace = "Ala"
  VARIANT (18)..(18): / replace = "Val" / replace = "Ser"
  VARIANT (19)..(19): / replace = "Phe"
  VARIANT (20)..(20): / replace = "Arg"
  VARIANT (21)..(21): / replace = "Asp"
  VARIANT (23)..(23): / replace = "Cys"
  VARIANT (24)..(24): / replace = "Lys"
  VARIANT (26)..(26): / replace = "His"
  VARIANT (27)..(27): / replace = "Asp"
  VARIANT (28)..(28): / replace = "Phe"
VERPPVWMMRQAGRYMKEYQELREKYPSF

SEQ ID NO: 516 - protein, 29 aa, artificial sequence
  motif 14
  VARIANT (2)..(2): / replace = "Ala"
  VARIANT (5)..(5): / replace = "Ile"
  VARIANT (11)..(11): / replace = "Val"
  VARIANT (12)..(12): / replace = "Ile"
  VARIANT (13)..(13): / replace = "Pro"
  VARIANT (14)..(14): / replace = "Gln"
  VARIANT (15)..(15): / replace = "Gly"
  VARIANT (17)..(17): / replace = "Asn"
  VARIANT (22)..(22): / replace = "Met"
  VARIANT (24)..(24): / replace = "Lys"
  VARIANT (25)..(25): / replace = "Ser"
  VARIANT (29)..(29): / replace = "Ile"
DGVILFSDILTPLPAMGIPFDIVEGKGPV

SEQ ID NO: 517 - protein, 21 aa, artificial sequence
  motif 15
  VARIANT (8)..(8): / replace = "Phe"
  VARIANT (12)..(12): / replace = "Ala" / replace = "Ser"
  VARIANT (14)..(14): / replace = "Ile" / replace = "Met"
  VARIANT (15)..(15): / replace = "Ile"
  VARIANT (19)..(19): / replace = "Gly"
  VARIANT (20)..(20): / replace = "Thr"
LGFVGAPWTLATYVVEGGSSK

SEQ ID NO: 518 - protein, 29 aa, artificial sequence
  motif 16
  VARIANT (4)..(4): / replace = "Lys"
  VARIANT (5)..(5): / replace = "Val"
  VARIANT (7)..(7): / replace = "Gln"
  VARIANT (13)..(13): / replace = "Met"
  VARIANT (23)..(23): / replace = "Ala"
  VARIANT (25)..(25): / replace = "Asn"
  VARIANT (26)..(26): / replace = "Val"
QPWRAFKPDGVILFSDILTPLPGMGIPFD

SEQ ID NO: 519 - protein, 25 aa, artificial sequence
  motif 17
  VARIANT (4)..(4): / replace = "Ala"
  VARIANT (6)..(6): / replace = "Leu"
  VARIANT (15)..(15): / replace = "Ala"
  VARIANT (16)..(16): / replace = "Ser"
  VARIANT (18)..(18): / replace = "Gln"
  VARIANT (21)..(21): / replace = "Ala"
  VARIANT (22)..(22): / replace = "Asp" / replace = "Lys"
  VARIANT (24)..(24): / replace = "His"
RPPVWMMRQAGRYMKVYRDLCEKYP

SEQ ID NO: 520 - protein, 41 aa, artificial sequence
  motif 18
  VARIANT (2)..(2): / replace = "Val"
  VARIANT (6)..(6): / replace = "Ala" / replace = "Val"
  VARIANT (7)..(7): / replace = "Glu"
  VARIANT (12)..(12): / replace = "Ala" / replace = "Cys"
  VARIANT (13)..(13): / replace = "Ile"
  VARIANT (20)..(20): / replace = "Gly"
  VARIANT (21)..(21): / replace = "Thr"
  VARIANT (22)..(22): / replace = "Glu"
  VARIANT (24)..(24): / replace = "Pro"
  VARIANT (26)..(26): / replace = "Val"
  VARIANT (28)..(28): / replace = "Trp" / replace = "Tyr"
  VARIANT (31)..(31): / replace = "Trp"
  VARIANT (32)..(32): / replace = "Ala"
  VARIANT (33)..(33): / replace = "Lys"
  VARIANT (36)..(36): / replace = "Ile" / replace = "Gln"
  VARIANT (37)..(37): / replace = "Gln"
  VARIANT (39)..(39): / replace = "Val"
  VARIANT (40)..(40): / replace = "Ile"
YIRYQIDSGAQVVQIFDSWAGQLSPQDFEEFSLPYLKQIVD

SEQ ID NO: 521 - protein, 50 aa, artificial sequence
  motif 19
  VARIANT (7)..(7): / replace = "Asn" / replace = "Asp"
  VARIANT (11)..(11): / replace = "Gly" / replace = "Thr"
  VARIANT (17)..(17): / replace = "Ala"
  VARIANT (18)..(18): / replace = "Lys"
  VARIANT (21)..(21): / replace = "Ala"
  VARIANT (22)..(22): / replace = "Glu"
  VARIANT (24)..(24): / replace = "Val"
  VARIANT (25)..(25): / replace = "Val"
  VARIANT (26)..(26): / replace = "Phe"
  VARIANT (29)..(29): / replace = "Asn"
  VARIANT (33)..(33): / replace = "Gln"
  VARIANT (48)..(48): / replace = "Glu" / replace = "Asp"
  VARIANT (49)..(49): / replace = "Val
MCHTAPHVLRALLSHLTQAISDYIIYQVESGAHCIQIFDSWGGQLPPHMW

SEQ ID NO: 522 - protein, 50 aa, artificial sequence
  motif 20
  VARIANT (14)..(14): / replace = "Gly"
  VARIANT (17)..(17): / replace = "Ala"
  VARIANT (37)..(37): / replace = "Asn"
  VARIANT (38)..(38): / replace = "Asp"
  VARIANT (40)..(40): / replace = "Gly"
  VARIANT (41)..(41): / replace = "Ile"
  VARIANT (49)..(49): / replace = "Phe"
YINGNGGLLERMKDTGVDVIGLDWTVDMADGRRRLGSGISVQGNVDPAYL

SEQ ID NO: 523 - protein, 29 aa, artificial sequence
  motif 21
  VARIANT (2)..(2): / replace = "Leu"
  VARIANT (16)..(16): / replace = "Val"
  VARIANT (21)..(21): / replace = "Met"
  VARIANT (23)..(23): / replace = "Asn"
  VARIANT (27)..(27): / replace = "Thr"
AVLGFVGAPWTIATYIVEGGTTRTYTNIK

SEQ ID NO: 524 - protein, 50 aa, artificial sequence
  motif 22
  VARIANT (2)..(2): / replace = "Met"
  VARIANT (12)..(12): / replace = "Val"
  VARIANT (15)..(15): / replace = "Ile" / replace = "Thr"
  VARIANT (16)..(16): / replace = "Ile"
  VARIANT (18)..(18): / replace = "Lys"
  VARIANT (19)..(19): / replace = "Arg"
  VARIANT (20)..(20): / replace = "His"
  VARIANT (22)..(22): / replace = "Thr"
  VARIANT (30)..(30): / replace = "Ala"
  VARIANT (33)..(33): / replace = "Ala"
  VARIANT (42)..(42): / replace = "Arg"
  VARIANT (43)..(43): / replace = "Ala"
WLMRQAGRYMKSYQDLCEKYPSFRERSENVDLVVEISLQPWKVFKPDGVI

SEQ ID NO: 525 - protein, 50 aa, artificial sequence
  motif 23
  VARIANT (3)..(3): / replace = "Gln"
  VARIANT (8)..(8): / replace = "Ser"
  VARIANT (12)..(12): / replace = "Val"
  VARIANT (40)..(40): / replace = "Ile"
  VARIANT (41)..(41): / replace = "Ala" / replace = "Glu"
  VARIANT (42)..(42): / replace = "Glu" / replace = "Ser" / replace = "Thr"
  VARIANT (45)..(45): / replace = "Gln"
  VARIANT (49)..(49): / replace = "Asn"
YIRYQADNGAQAVQIFDSWATELSPVDFEEFSLPYLKQIVDAVKKTHPDL

SEQ ID NO: 526 - protein, 50 aa, artificial sequence
  motif 24
  VARIANT (4)..(4): / replace = "Gln"
  VARIANT (7)..(7): / replace = "Ser"
  VARIANT (11)..(11): / replace = "Ala" / replace = "Glu"
  VARIANT (14)..(14): / replace = "Asn" / replace = "Asp"
  VARIANT (16)..(16): / replace = "Lys"
  VARIANT (18)..(18): / replace = "Thr"
  VARIANT (33)..(33): / replace = "Ile"
  VARIANT (41)..(41): / replace = "His"
  VARIANT (42)..(42): / replace = "Tyr"
  VARIANT (43)..(43): / replace = "Ser"
  VARIANT (47)..(47): / replace = "Lys"
  VARIANT (48)..(48): / replace = "Met"
YVGEALTILRKEVGNEAAVLGFVGAPFTLASYVVEGGSSKNFTKIKRLAF

SEQ ID NO: 527 - protein, 50 aa, artificial sequence
  motif 25
  VARIANT (14)..(14): / replace = "Ile"
  VARIANT (20)..(20): / replace = "Glu"
  VARIANT (21)..(21): / replace = "Asn"
  VARIANT (22)..(22): / replace = "His"
  VARIANT (32)..(32): / replace = "Ala"
  VARIANT (35)..(35): / replace = "Ser"
  VARIANT (36)..(36): / replace = "Tyr"
  VARIANT (40)..(40): / replace = "Met"
  VARIANT (43)..(43): / replace = "Phe"
  VARIANT (44)..(44): / replace = "His" / replace = "Lys"
PVWMMRQAGRYMKVYRDLRDKYPSFRERSENPDLAIEISLQPWRAFQPDG

SEQ ID NO: 528 - protein, 50 aa, artificial sequence
  motif 26
  VARIANT (2)..(2): / replace = "Leu"
  VARIANT (3)..(3): / replace = "Ser"
  VARIANT (7)..(7): / replace = "Gln"
  VARIANT (8)..(8): / replace = "Ser"
  VARIANT (13)..(13): / replace = "Ile"
  VARIANT (15)..(15): / replace = "Leu"
  VARIANT (24)..(24): / replace = "Thr"
  VARIANT (29)..(29): / replace = "Glu"
  VARIANT (30)..(30): / replace = "Val" / replace = "Glu"
  VARIANT (33)..(33): / replace = "Ala"
  VARIANT (37)..(37): / replace = "Lys"
  VARIANT (38)..(38): / replace = "Gln"
  VARIANT (41)..(41): / replace = "Asp" / replace = "Asn"
  VARIANT (42)..(42): / replace = "Gln"
  VARIANT (45)..(45): / replace = "Ala"
  VARIANT (46)..(46): / replace = "Lys"
YVRYQIDCGAQVVQMFDSWAGQLSPQDYDTFALPYQQKVVRLVKETHPDT

SEQ ID NO: 529 - protein, 50 aa, artificial sequence
  motif 27
  VARIANT (1)..(1): / replace = "Arg"
  VARIANT (9)..(9): / replace = "Lys"
  VARIANT (10)..(10): / replace = "Ser"
  VARIANT (11)..(11): / replace = "Ala"
  VARIANT (18)..(18): / replace = "Ser"
  VARIANT (26)..(26): / replace = "Val"
  VARIANT (27)..(27): / replace = "Val"
  VARIANT (34)..(34): / replace = "Asp"
  VARIANT (37)..(37): / replace = "Ile"
  VARIANT (47)..(47): / replace = "Ala"
  VARIANT (48)..(48): / replace = "Leu"
TLRQEVGNQATVLGFVGAPWTLAAYAIEGKSSKNYAVIKAMAFSEPEILH

SEQ ID NO: 530 - protein, 50 aa, artificial sequence
  motif 28
  VARIANT (3)..(3): / replace = "His"
  VARIANT (8)..(8): / replace = "Ala"
  VARIANT (8)..(8): / replace = "Asp"
  VARIANT (16)..(16): / replace = "Met"
  VARIANT (18)..(18): / replace = "Cys"
  VARIANT (19)..(19): / replace = "His"
  VARIANT (22)..(22): / replace = "Tyr"
  VARIANT (23)..(23): / replace = "Lys" / replace = "Arg"
  VARIANT (24)..(24): / replace = "Met"
  VARIANT (27)..(27): / replace = "Ile"
  VARIANT (39)..(39): / replace = "Thr"
  VARIANT (40)..(40): / replace = "Met"
  VARIANT (43)..(43): / replace = "Asp"
  VARIANT (46)..(46): / replace = "Ile" / replace = "Met"
FRERSETPEIAIELSLQPWRAFGPDGVIMFSDILTPLPALGIEFDVVKGK

SEQ ID NO: 531 - protein, 50 aa, artificial sequence
  motif 29
  VARIANT (1)..(1): / replace = "Ser"
  VARIANT (5)..(5): / replace = "Ser"
  VARIANT (6)..(6): / replace = "His"
  VARIANT (8)..(8): / replace = "Thr"
  VARIANT (9)..(9): / replace = "Glu"
  VARIANT (10)..(10): / replace = "Met"
  VARIANT (11)..(11): / replace = "Ile"
  VARIANT (12)..(12): / replace = "Ile"
  VARIANT (15)..(15): / replace = "Ala"
  VARIANT (17)..(17): / replace = "Tyr"
  VARIANT (20)..(20): / replace = "Asp"
  VARIANT (26)..(26): / replace = "Ile"
  VARIANT (28)..(28): / replace = "Leu" / replace = "Val"
  VARIANT (30)..(30): / replace = "Glu"
  VARIANT (34)..(34): / replace = "Gly"
  VARIANT (35)..(35): / replace = "Gln"
  VARIANT (39)..(39): / replace = "Ala"
  VARIANT (41)..(41): / replace = "Tyr"
  VARIANT (42)..(42): / replace = "Glu"
  VARIANT (45)..(45): / replace = "Ala"
  VARIANT (46)..(46): / replace = "Lys" / replace = "Leu"
  VARIANT (48)..(48): / replace = "Ala"
  VARIANT (49)..(49): / replace = "Asn"
  VARIANT (50)..(50): / replace = "Gln"
HAFLDKLADALGVYVCHQIESGAQVVQIFDSWAHHLSPQQFLEFSHPYAE

SEQ ID NO: 532 - protein, 29 aa, artificial sequence
  motif 30
  VARIANT (4)..(4): / replace = "Lys"
  VARIANT (5)..(5): / replace = "Val"
  VARIANT (7)..(7): / replace = "Gln"
  VARIANT (13)..(13): / replace = "Met"
  VARIANT (23)..(23): / replace = "Ala"
  VARIANT (25)..(25): / replace = "Asn"
  VARIANT (26)..(26): / replace = "Val"
QPWRAFKPDGVILFSDILTPLPGMGIPFD

SEQ ID NO: 533 - DNA, 2194 bp, Oryza sativa; identical to SEQ ID NO: 289

SEQ ID NO: 534 - DNA, 56 bp, Artificial sequence
  primer: prm12179
ggggacaagtttgtacaaaaaagcaggcttaaacaatgaactctgcttctcttagc

SEQ ID NO: 535 - DNA, 50 bp, Artificial sequence
  primer: prm12180
ggggaccactttgtacaagaaagctgggtgacaccactccttaaactacc

SEQ ID NO: 536 - DNA, 951 bp, Populus trichocarpa
atggctatgcaagcaggagtcagcgtctctaggatcctcatcctcgccggagcaggatataccggtacgattatgctcaaaaacggtaaattatcagaattattgggtgaacttcagtccttgacgaagggtatgggaaaatctggggaacaatctgatggtgattctgactactctgatgccattgcccaacaggtacgtcggttagcaatggaagttcgacaactggcctctgcacggcaaataacagttctcaatgggaattctggccaaatgggtaacctcactggtcttatagctccagctgccaccttgggggcattgggttatggttacatgtggtggaagggtctaaaattctcagattttatgtacgtaacaaagcgtagtatggcaagtgctgtttcaaacttgacaaaacatttggagcaagtatctgaggctctgtctactgccaagacgcatttgacacagagaatacaacttttggatgataaaatggagagtcaaaaggagatctcaaaggcaattcaaaatgacgtcaatgctgcctctgaaaatcttacacaaattggttctgagttatggcagttgcagtgtttagtatctggtttggatggaaagataggttcattggaggagaaacaggatattgcaaatatgggtgtgatgtacctgtgcaactttgttggtggcaaaaaagcaaaaatgcctaaagctctagaggatcagttcaaaccttcaggaagaactcgtgcttcactcatgtactctgaagtcccaagtttgacgggtctaaaggagcttgcagacgatttatctcaaaccttcggtgagccagccactgatgctattctgcaagatggaactgataatctggaagaccagccaagaatcccacgtattgatcaaccgagagctctgctcaggtttaattctgccaggtgttga

SEQ ID NO: 537 - protein, 316 aa, Populus trichocarpa
MAMQAGVSVSRILILAGAGYTGTIMLKNGKLSELLGELQSLTKGMGKSGEQSDGDSDYSDAIAQQVRRLAMEVRQLASARQITVLNGNSGQMGNLTGLIAPAATLGALGYGYMWWKGLKFSDFMYVTKRSMASAVSNLTKHLEQVSEALSTAKTHLTQRIQLLDDKMESQKEISKAIQNDVNAASENLTQIGSELWQLQCLVSGLDGKIGSLEEKQDIANMGVMYLCNFVGGKKAKMPKALEDQFKPSGRTRASLMYSEVPSLTGLKELADDLSQTFGEPATDAILQDGTDNLEDQPRIPRIDQPRALLRFNSARC

SEQ ID NO: 538 - DNA, 951 bp, Populus trichocarpa
atggctatgcaagcaggagtcagcgtctctaggatcctcatcctcgccggagcaggatataccggtacgattatgctcaaaaacggtaaattatcagaattattgggtgaacttcagtccttgacgaagggtatgggaaaatctggggaacaatctgatggtgattctgactactctgatgccattgcccaacaggtacgtcggttagcaatggaagttcgacaactggcctctgcacggcaaataacagttctcaatgggaattctggccaaatgggtaacctcactggtcttatagctccagctgccaccttgggggcattgggttatggttacatgtggtggaagggtctaaaattctcagattttatgtacgtaacaaagcgtagtatggcaagtgctgtttcaaacttggcaaaacatttggagcaagtatctgaggctctgtctactgccaagacgcatttaacacagagaatacaacttttggatgataaaatggagagtcaaaaggagatctcaaaggcaattcaaaatgacgtcaatgctgcctctgaaaatcttacacaaattggttctgagttatggcagttgcagtgtttagtatctggtttggatggaaagataggttcattggaggagaaacaggatattgcaaatatgggtgtgatgtacctgtgcaactttgttggtggcaaaaaagcaaaaatgcctaaagctctagaggatcagttcaaaccttcaggaagaactcgtgcttcactcatgtactctgaagtcccaagtttgacgggtctaaaggagcttgcagacgatttatctcaaacattcggtgagccagccactgatgctattctgcaagatggaactgataatctggaagaccagccaagaatcccacgtattgatcaaccgagagctctgctcaggtttaattctgccaggtgttga

SEQ ID NO: 539 - protein, 316 aa, Populus trichocarpa
MAMQAGVSVSRILILAGAGYTGTIMLKNGKLSELLGELQSLTKGMGKSGEQSDGDSDYSDAIAQQVRRLAMEVRQLASARQITVLNGNSGQMGNLTGLIAPAATLGALGYGYMWWKGLKFSDFMYVTKRSMASAVSNLAKHLEQVSEALSTAKTHLTQRIQLLDDKMESQKEISKAIQNDVNAASENLTQIGSELWQLQCLVSGLDGKIGSLEEKQDIANMGVMYLCNFVGGKKAKMPKALEDQFKPSGRTRASLMYSEVPSLTGLKELADDLSQTFGEPATDAILQDGTDNLEDQPRIPRIDQPRALLRFNSARC

SEQ ID NO: 540 - DNA, 564 bp, Prunus persica
atggctatgcaaagcggaatagggttttccaagatcctgatcttagctggagcagggtatactagcaccatcctgcttaagaatggtaaattatctgacttgatcggtgaacttcagtctttgttgaatggaaccggagaacaatcagaaggtgactttgatgcgatcgcatcacaggtgcgccgactggcagctgaggtccggcaacttggctcgtcacgacagataaccgtcctgaatgggaatggcagccaaattggtttgacatcactaataatgccagcagctaccttgggggcattgggttatggttacatgtggtggaagggtctaaaattctcagatcttatgtatgtgacgaagcgtagtatgactgctgctgtttcaaacttgcataaacatctggagagcgtgacagaggctattgctaacacaaagaagcacctgacacagagagtccagaatttggacgataaattgctggagcagaaagagatctcaaagtcgattctggagaatgtggtgatacgaaaggaagtattgaggaactttacgttaccgtga

SEQ ID NO: 541 - protein, 187 aa, Prunus persica
MAMQSGIGFSKILILAGAGYTSTILLKNGKLSDLIGELQSLLNGTGEQSEGDFDAIASQVRRLAAEVRQLGSSRQITVLNGNGSQIGLTSLIMPAATLGALGYGYMWWKGLKFSDLMYVTKRSMTAAVSNLHKHLESVTEAIANTKKHLTQRVQNLDDKLLEQKEISKSILENVVIRKEVLRNFTLP

SEQ ID NO: 542 - DNA, 696 bp, Citrus sinensis
atggctatgcaagcaggaatgagcttccaaaagatactgatgttagctggtttagggtacactggtacgatcttgataaaggatggtaaattaccagaattattacgggagctccagtcattggtagagcgattgtcaaaatctggagagcaagataattttactgatgctattaaagatcagttgaaccggttgaaatttgagtgtcagcgggcatcatctggacagatatttgtgcgtaatgagaattctggtggcaatgcaacttctctcatgattccagctgctactttgggggcattaggttatggttacatgtggtggaagggtctttcatttgctgatctcatgtatgttaccagaaaaagtatggctactgctgtgtcaaacttgaataaacatctggagagcgtaacagaagcccttacagtggcaaagaagcatttgacgcagcgtattcagaaccttaatgataaagtggaaaagcagaatgagatctcaaaggatattagaaaaaatgttgaggaggcttgtgatgacctttttaaagttgaacataacttgaaggacttgcagagcatgatttattgtttggatgggaagattgattcattggcagataagcaggatataacaaatattggcatgtacctcctctgtaactttgttgatggggaaaaaagggaaaccaactga

SEQ ID NO: 543 - protein, 231 aa, Citrus sinensis
MAMQAGMSFQKILMLAGLGYTGTILIKDGKLPELLRELQSLVERLSKSGEQDNFTDAIKDQLNRLKFECQRASSGQIFVRNENSGGNATSLMIPAATLGALGYGYMWWKGLSFADLMYVTRKSMATAVSNLNKHLESVTEALTVAKKHLTQRIQNLNDKVEKQNEISKDIRKNVEEACDDLFKVEHNLKDLQSMIYCLDGKIDSLADKQDITNIGMYLLCNFVDGEKRETN

SEQ ID NO: 544 - DNA, 696 bp, Malus domestica
atggctatgcagagcggaataggggtttccaagatcctgatcttagctggggcagggtatactggcaccatccttcttaagaacggtaaattatccgagctgctcggtgaacttcagtcattgttgaatggatccggggaacacgcagacggtgactatgactccctcacagcacagattagccgaatgacagctgagatcaggcaaattggctcgtcgcgtggcgggggaacggtttttgtgaatgggaacggtagccaaattggtaatatgacatcactaataatgccagcagctaccttgggagcagtgggttatggatacatgtggtggaagggtctaaaattctcagatatgatgtatgtgacaaagcgtggtatggctactgctgttgagaacttgactaaaaatctggataacgtgaaggaggctgttgctaaagcaaagaagcacctgacgcaaaggattcaccatgtggatgacaaaatggcggagcaaaatgagctctcaaggtcaattaacgaagatgttgctggagtgcaacattctcttactgatattgactatgacttgagtagattgcagagcatggtttctggtttggatcataagatgggttctcttgaacaaaagcaggatcttgcaaatcttggtgttatcttacctggccaattttgtccatggaaaaaaagttga

SEQ ID NO: 545 - protein, 231 aa, Malus domestica
MAMQSGIGVSKILILAGAGYTGTILLKNGKLSELLGELQSLLNGSGEHADGDYDSLTAQISRMTAEIRQIGSSRGGGTVFVNGNGSQIGNMTSLIMPAATLGAVGYGYMWWKGLKFSDMMYVTKRGMATAVENLTKNLDNVKEAVAKAKKHLTQRIHHVDDKMAEQNELSRSINEDVAGVQHSLTDIDYDLSRLQSMVSGLDHKMGSLEQKQDLANLGVILPGQFCPWKKS

SEQ ID NO: 546 - DNA, 831 bp, Arabidopsis thaliana
atggctatgcaatctggtattgggttatcgaagattttgattctagctggagcaggttatactagtacgattctggttaagaatgggaagatggcagatattttgggtgagcttcaggctttggttaagcgatttgagaaatctggagatcatgtagatgatgattctgatgccatgactactcagatgcaacgattagcaatggaggttcggcaattggcttcgtcgcggcagataactgttatgaatggagctcagggagctgattttacaccgtttattgtcccggcagcgacattgggagcattaggctatggctatatgtggttcaagggaatttcattctctgatatcatgtgtgtaacgaagcggaacatggaaaatgcagtgtcgaacttgaccaagcatttggataccgtttcagaagctattttgaatgctaagaagcacctgagccagcggcttcagaaggtggacgataagctagacttgcagaaagatctcttaaagggagtccaggataatgtgggtttggctcttgaggatcttgctaacattggagatgattttgacgcaatgcatagcatctttggtggtatgggtgggaaattagatagcattgagtacaagcagaatattgcgaacatgggtttgatatatctgtgcgactctttgggtggagaaaatcacaagatgccggatatattgatgcaggagaagcttcggctttcagggaagtcaaacacatgtatagtacttacaaccgaagaaacttcaagctcagagggtttaaaagaaagcgataagatacagctactagatgactgctaa

SEQ ID NO: 547 - protein, 276 aa, Arabidopsis thaliana
MAMQSGIGLSKILILAGAGYTSTILVKNGKMADILGELQALVKRFEKSGDHVDDDSDAMTTQMQRLAMEVRQLASSRQITVMNGAQGADFTPFIVPAATLGALGYGYMWFKGISFSDIMCVTKRNMENAVSNLTKHLDTVSEAILNAKKHLSQRLQKVDDKLDLQKDLLKGVQDNVGLALEDLANIGDDFDAMHSIFGGMGGKLDSIEYKQNIANMGLIYLCDSLGGENHKMPDILMQEKLRLSGKSNTCIVLTTEETSSSEGLKESDKIQLLDDC

SEQ ID NO: 548 - DNA, 852 bp, Gossypium hirsutum
atggctatgcaaaccggagtaggtttgtcgaagatcttgatcttagccggcgccggttatacgggtactgtcctcctgaaaaacggtaaattatcggacatattaggcgaattgcagtcgctggtgaagggactcgaaaaatcgggggagcaagctgatgattcagatgcacttctagctcaggtgcgtcgtttgtcaacggagatcaggcaactggcatcagcacggcagataactgttctgaatggggattctggcggtaagttaacctctcttgtagtgccagccgcaacattgggggcattgggttatggttacatgtggtggaagggtatttcattctctgatcttttctgggtcaccaaacgcaatatggcgatggctgtggagaacttaacaaaacatctggattctgtctcagatgctctctctgctgcgaagaagcatttgactcaacgcattcagaacctggatgataaaatggaaacacagaaggaaatctcgaagagcattcaaacaagtgtagaagaggctcatatgaatctgtctaatattgaatatgatttggatgcactgcagagaatgatctctggtttggatggcaaaattggttcattggaatataagcaggatcttgctaatgctggtgtgtggtacctttgtaatatggttggtggaaagaaagcaaacatgcctgaagctctgcaggagcaacttaaactttctgggaaatctcgtgctttacttgcatcaggaactccagctctgaagggtctgaaagatgttgcagatatttcatctggaaatatgaatgattcaggaagagatggttttgtgaaagatggcttttga

SEQ ID NO: 549 - protein, 283 aa, Gossypium hirsutum
MAMQTGVGLSKILILAGAGYTGTVLLKNGKLSDILGELQSLVKGLEKSGEQADDSDALLAQVRRLSTEIRQLASARQITVLNGDSGGKLTSLVVPAATLGALGYGYMWWKGISFSDLFWVTKRNMAMAVENLTKHLDSVSDALSAAKKHLTQRIQNLDDKMETQKEISKSIQTSVEEAHMNLSNIEYDLDALQRMISGLDGKIGSLEYKQDLANAGVWYLCNMVGGKKANMPEALQEQLKLSGKSRALLASGTPALKGLKDVADISSGNMNDSGRDGFVKDGF

SEQ ID NO: 550 - DNA, 912 bp, Brassica napus
atggcgatgcaaaccggaatcggcttatcaaggatctttctcttagccggagcaggttgtaccggtacgatcatgatgaagaacggtaaattatctgatatattgggtgaattgcagtctctggtgaagggtatggagagatctggagaggaaggagactctgatgtctccgatgctatagctgcacaggttcgtcgtttggctatggaggttcgtcagctagcttcggctcggcagataacggttatgaatggagtttctggtgcgaacttgcaagcacttgctgttcctgctgcggcgttgggagctttaggatatggttatatgtggtggaagggactctcgttcactgaccttatgtatgtgacgaaagccaacatggctactgccgtggctaacttgactaagaatctggagcaagtttctgcgacccttgcggctgcaaaaaggcatttaacgcagaagattcagaatatggatgataaggtagagaagcagattgatctctccaaggaaatcaagaaccaggtcaccttggctcgtggagatatcaacttgcttgagaatgagttgcagtctttgaatgatttgattagtggtctggatgggaagttggacacgctggaatacaagcaggatgtcacaaatgtttgcatgctacacttgtataactattttggaggcaagagcaccaaactgcctgacatggagcagcttcaactgcctgtaaaccagaaagctcgtaatttgcttggagatgttggaactaaggggctgaaaaactttgcggaacaactgcttataagcaatgacacagagggaggagcaaccacggtgagaagaattggtataaccagggccaatgacaagtcggggccgctgttatcaagggttgcttcagctgggtgttga

SEQ ID NO: 551 - protein, 303 aa, Brassica napus
MAMQTGIGLSRIFLLAGAGCTGTIMMKNGKLSDILGELQSLVKGMERSGEEGDSDVSDAIAAQVRRLAMEVRQLASARQITVMNGVSGANLQALAVPAAALGALGYGYMWWKGLSFTDLMYVTKANMATAVANLTKNLEQVSATLAAAKRHLTQKIQNMDDKVEKQIDLSKEIKNQVTLARGDINLLENELQSLNDLISGLDGKLDTLEYKQDVTNVCMLHLYNYFGGKSTKLPDMEQLQLPVNQKARNLLGDVGTKGLKNFAEQLLISNDTEGGATTVRRIGITRANDKSGPLLSRVASAGC

SEQ ID NO: 552 - DNA, 915 bp, Arabidopsis thaliana
atggcgatgcaggccggagttggcttatccaggatctttctcttagccggagcaggttacactggtacgatcatgatgaagaatggaaaattgtcggatttgttgggtgaattgcagagtttggtgaagggaatggagaaatctggagaagggtctgagggagattctgatgtttctgatgctatagctgcacaggttcgccggttggctatggagattcgacagctagcttcgcagcaacacataacggtcatgaatggagtttctggtgcaaacctacaagcccttgctgttcctgctgcggcattgggagctctcggatatggttatatgtggtggaagggactctcattcactgaccttatgtatgtgacaaaagccaacatggctgctgcagtggctaacttgacaaagaatctggagcaagtttctgagactcttgcggctgcgaaaaggcatttaacacaaaggattcagaatctggatgataaggtagaaaagcagatcgatctctcgaaggaaatcaatagccaggttatttctgctcgtgagaatatcagctcacttgagatggatttggaatcattgcataatttgattactggactggatgggaagttggacacgctggaatacaagcaggatgtcacaaatgttttcatgctaaacttgtataactattttggaggcaagagcacaaagctgcctgaaatggaacagcttcagcttcctgtaaaccagagggctcgtaatttgcttgcagatgttgaaactaagggtctgaaaaacttggctgaagagctgtttaaaagcaatggcacacaggtgacaaccacagtgaaacaaatcagtttgagtaaagtgaatgtgaagtcgaggccattgttatcaagggctgcttcagctaagtgttga

SEQ ID NO: 553 - protein, 304 aa, Arabidopsis thaliana
MAMQAGVGLSRIFLLAGAGYTGTIMMKNGKLSDLLGELQSLVKGMEKSGEGSEGDSDVSDAIAAQVRRLAMEIRQLASQQHITVMNGVSGANLQALAVPAAALGALGYGYMWWKGLSFTDLMYVTKANMAAAVANLTKNLEQVSETLAAAKRHLTQRIQNLDDKVEKQIDLSKEINSQVISARENISSLEMDLESLHNLITGLDGKLDTLEYKQDVTNVFMLNLYNYFGGKSTKLPEMEQLQLPVNQRARNLLADVETKGLKNLAEELFKSNGTQVTTTVKQISLSKVNVKSRPLLSRAASAKC

SEQ ID NO: 554 - DNA, 918 bp, Malus domestica
atggctatgcagagcggaatagggttttccaagatcctgatcttagcaggggcagggtatacaagcaccatcctgcttaagaacggtaaattatccgacttgctcggtgaacttcagtctttgttgaatggatccggggaacacacagaaggtgactatgattccttgacagcacagattagccgactaacagctgagatcaggcaaattggctcgtcgcggggcggcagcacggttttcgtgaatgggaacggtagccaaattggtaatatgacatctctaataatgccagcagctaccttgggagcagtgggttatggttacatgtggtggaagggtctaaaactctcagatattatgtacgtgacaaaacgtggcatggctaccgctgttgagaacttgactaaaaatctggataatgtgaaagaggccgttgctaaagcaaagaagcacctgacgcagagaatccagcatgttgatgacaaaatggtggagcaaaatgagctctcaaggtcaattaaggaagatgttgctggagtgcaacattctctcactgatattgactatgacttgagtagattgcagatcatggtttctggtttggatcataagattggttctcttgaacacaagcaggatctcgcaaaccttggtgttatctacctggtcaattttgtggatgggaaaaaagttgaaatgcctaaaactctgcagaagcaacttgaaaaccctgggaagtcacgtggtcgtttactctcatattcagatacttcaggcttgatgggtctcaaagaaattgcggactctctgtctgaaacattaaatccatcaactgatgctattgtgaaagatgatattgaaatgacgggggagtatcggaagaacaacctgataaggtcggtgtcgaccagatgttga

SEQ ID NO: 555 - protein, 305 aa, Malus domestica
MAMQSGIGFSKILILAGAGYTSTILLKNGKLSDLLGELQSLLNGSGEHTEGDYDSLTAQISRLTAEIRQIGSSRGGSTVFVNGNGSQIGNMTSLIMPAATLGAVGYGYMWWKGLKLSDIMYVTKRGMATAVENLTKNLDNVKEAVAKAKKHLTQRIQHVDDKMVEQNELSRSIKEDVAGVQHSLTDIDYDLSRLQIMVSGLDHKIGSLEHKQDLANLGVIYLVNFVDGKKVEMPKTLQKQLENPGKSRGRLLSYSDTSGLMGLKEIADSLSETLNPSTDAIVKDDIEMTGEYRKNNLIRSVSTRC

SEQ ID NO: 556 - DNA, 939 bp, Medicago truncatula
atggctatggcttatcatagtggaatcgggatctccaaggtcctattcatcgccgtaactggttacaccggcaccgtcctcctcaaaaacggcaaattatccgatttgatcggtgatctccaggcactggtgaaaggattggaaaagtccggggatcaggctgaaggtgaaggagaacatgcatcggatgctattgctgctcagattcggcgtttggctaatgaagtgaagcatttatcatcaaacagacaaaccatagtaatgaatggaggctcaggacaaagtagtaatttgtcatctcttgtggttccagcagccaccttgggtgctgtgggttatggttacatgtggttgaagggcgtttcattctcagatcttatgtacgtgactaaacgcaacatggaaaatgctgttgcagatttgacaaaaaagctgcagcatgcctcggatgtcattgctgatgctaagaagcacttgacccagagaattcaaattttggatgacaaaatgcgcaaacaatataagatggcacagtcaattaaggatgatgttaataaagttcaagatactgttactactatacatgatgacttgagcgtcgtgcaacacacagtgaaaatgttggatggaaggttgaattcagtacttgagaatcaggaatttgcaaatatgggattggactatattattggctttataacggcaaatgcccggagagtgccggactctttacagggaactattccaaaggaacaaccaaaacttccagggaggtctactagtatgctcacatatccaggatttcagggtcttaaagacattgcagagtcattgtctagtttagacaggtcagcttcagatactattgtgccgggtggtttggataatctggagaagcagcgaaggccgttgttgagggctacttcgaccaagtgttga

SEQ ID NO: 557 - protein, 312 aa, Medicago truncatula
MAMAYHSGIGISKVLFIAVTGYTGTVLLKNGKLSDLIGDLQALVKGLEKSGDQAEGEGEHASDAIAAQIRRLANEVKHLSSNRQTIVMNGGSGQSSNLSSLVVPAATLGAVGYGYMWLKGVSFSDLMYVTKRNMENAVADLTKKLQHASDVIADAKKHLTQRIQILDDKMRKQYKMAQSIKDDVNKVQDTVTTIHDDLSVVQHTVKMLDGRLNSVLENQEFANMGLDYIIGFITANARRVPDSLQGTIPKEQPKLPGRSTSMLTYPGFQGLKDIAESLSSLDRSASDTIVPGGLDNLEKQRRPLLRATSTKC

SEQ ID NO: 558 - DNA, 951 bp, Populus trichocarpa
atggctatgcaagctggaatcggcgtctctaggatcctcatcctcgccggagcaggatacaccggtacgatcatgctcaaaaacggtaaattatccgaattaatcgctgaacttcagagcttggtgaaggggatggaaaaatccggggaaaaatctgatggtgattctgactactctgatgccattgcccaacaggtgcgtaggttggcaatggaagttcggcaactggcctctgcacggcaaataacagttctcagtgggaatcctggccaaatgggtaacctcacaggtcttataattccagctgccaccctgggggcattgggttacggttacatgtggtggaagggtctaaaattctcagatcttatgtatgtaacaaagcgcagtatggcaagtgctgtttcaaacttgacaaaacatttggagcaagtatccgaggctctgtctactgccaagacacatttaacacaaagaatacaacatttggatgataaaatggagagtcaaaaggagatctcaaaggcaattcaaaatgatgtcaatgctgcctctgaaaatctaacactaattggttctgagctgtggcagttgcagtgtttggtatctggtctggatgggaagataggttcattggaggagaaacaggatattgcaaatatgggtgtgatgtacttgtgcaactttgttggtggcaaaaaagcaaaaatgcctaaagctctggaggatcagcttaaaccttcagggagaactcgtgcctcactcgcatacgctgaagtcccaagtttgacgggtctaaaggagcttgcagacgatttatctcaaactttcagcaagccagcaactgatgctactttgcaagatggaactgataatctggaagaccagctaagaaccccacgtaatgatcaaccaagagctcttctcaggtttaattctgccaggtgttga

SEQ ID NO: 559 - protein, 316 aa, Populus trichocarpa
MAMQAGIGVSRILILAGAGYTGTIMLKNGKLSELIAELQSLVKGMEKSGEKSDGDSDYSDAIAQQVRRLAMEVRQLASARQITVLSGNPGQMGNLTGLIIPAATLGALGYGYMWWKGLKFSDLMYVTKRSMASAVSNLTKHLEQVSEALSTAKTHLTQRIQHLDDKMESQKEISKAIQNDVNAASENLTLIGSELWQLQCLVSGLDGKIGSLEEKQDIANMGVMYLCNFVGGKKAKMPKALEDQLKPSGRTRASLAYAEVPSLTGLKELADDLSQTFSKPATDATLQDGTDNLEDQLRTPRNDQPRALLRFNSARC

SEQ ID NO: 560 - DNA, 552 bp, Saccharum officinarum
atggcgctggtgcaggcgggcatgggcctcactcgggtcgtggtcctcgtcggcgccggcgtcgccggctccgtcgtcctccgcaacggccgcctcgccgagatcctcggcgagctccaggagatactagacaaggggaacaaggggaaggacggaggagggggagacggggaagccgatctcaacgaggcgcttacctcgcaggtgcgtcgcctaaccatggaggtcaggcaacttgcttcttcacgtccaataactgttctcaatggaggttctggacaatcaggagtatcaggcctgatagtacctgcagcgactgtaggagcactgggttatggttatatgtggtggaaagcccaggggatctcgtttgccgacctaatgtatgtcaccaagcgcaacatggcaaatgctgtttcaagcatgactaaacatttggagcaagtccaaagttctcttgctgctgctaaaaggcatttgacacagcgcattgaaaagttggatgataaaattggatcagcaaaaggctctatctggacaaataagagatga

SEQ ID NO: 561 - protein, 183 aa, Saccharum officinarum
MALVQAGMGLTRVVVLVGAGVAGSVVLRNGRLAEILGELQEILDKGNKGKDGGGGDGEADLNEALTSQVRRLTMEVRQLASSRPITVLNGGSGQSGVSGLIVPAATVGALGYGYMWWKAQGISFADLMYVTKRNMANAVSSMTKHLEQVQSSLAAAKRHLTQRIEKLDDKIGSAKGSIWTNKR

SEQ ID NO: 562 - DNA, 717 bp, Persea americana
atggcaatgcaaagcggagtagggctttccaagatcttgatcattgcgggagcaggttatactggcgcgatcgtgctgaaagagcgtcacttagcggatatattacgggatcttctggagattttgtcgaagagcaaaccgaaatcggaagacggaaacgcccacttctcggacgacaaggatgtcttagatcaggtgcgccggttggcaatggaagtccgacaactagccacagcacggccgataacagtgttcaatggagaatcaagccaattgggaagcatagcgtctcttgcaatgccagctgcagccttgggcgcattgggctatggttacatgtggtggaaagggctgtcctttacagatctgatgtatgtaacgaagcgcaacatgacaaatgctgtatcaagcttaacaaaaaacttggagcaagtttctgctgcccttgctgctacaaagaggcatttgacacagcgaattgagaatttggatgggaagttagatgagcagaaggagatgtcaaaattaattaagaacgaggttactgagggtcgtgctgatatttctcaaattggttatgacttagaaacactgcagaaattggtcaatgggttggacggaaagataggtaccttggaagacaaacaggattttgcaaattctggtgtgtggtacctttggtcaatatgctggagtaaaagatccgaaaatggctga

SEQ ID NO: 563 - protein, 238 aa, Persea americana
MAMQSGVGLSKILIIAGAGYTGAIVLKERHLADILRDLLEILSKSKPKSEDGNAHFSDDKDVLDQVRRLAMEVRQLATARPITVFNGESSQLGSIASLAMPAAALGALGYGYMWWKGLSFTDLMYVTKRNMTNAVSSLTKNLEQVSAALAATKRHLTQRIENLDGKLDEQKEMSKLIKNEVTEGRADISQIGYDLETLQKLVNGLDGKIGTLEDKQDFANSGVWYLWSICWSKRSENG

SEQ ID NO: 564 - DNA, 855 bp, Centaurea maculosa
atggcgatgcaagctggaatggggttttctaagatcatcatcttagttggagcagggtacactggtaccttgatgatgaaaaacggtaaactttctgatgttttgggcgaacttcaggctttggtgaaaggatatgaagaaaagcaggggggtggagctgaaactgatcattccgatgcaattgcggcccaggttcgtcgattagcaatggaagttcggcagatggcttcgtcaaggcagatcactgttctgaatggtggttctagtggtactgcatcatctttagtggtaccggttgctaccttgggagctgtgggttatggatacatgtggtggaagggttattcgttctcggatctcatgtatgtgacaaagcaaaatatggcaactgctgtcacaaacttgacaaagcatctggaacaagtgtcagatgcccttgctgcagccaagaagcacttgacacagaggattgagaacttagatggaaaacttgatcagcaagtggaaatatcaaagttgattaaaagtgaggtgactgatgttcgtgatgatctttcccaaataggctacgacttggattcactaaatagaatggtttctggtctgaatggcaagataatgacattggaagaaaagcaggatctaaccaaccttggagtgtggtacctctgcaacaaagctgatggaaacaagatctctggcaaggcacaggaacaattccgacttgctggcaaatcctttgctggttatctcacatccaggggaacactaaatctcgagggcgtgaaggaaatggccgatactttagactcagatgatgcttctttggggtcggacaaacacttagagggctga

SEQ ID NO: 565 - protein, 284 aa, Centaurea maculosa
MAMQAGMGFSKIIILVGAGYTGTLMMKNGKLSDVLGELQALVKGYEEKQGGGAETDHSDAIAAQVRRLAMEVRQMASSRQITVLNGGSSGTASSLVVPVATLGAVGYGYMWWKGYSFSDLMYVTKQNMATAVTNLTKHLEQVSDALAAAKKHLTQRIENLDGKLDQQVEISKLIKSEVTDVRDDLSQIGYDLDSLNRMVSGLNGKIMTLEEKQDLTNLGVWYLCNKADGNKISGKAQEQFRLAGKSFAGYLTSRGTLNLEGVKEMADTLDSDDASLGSDKHLEG

SEQ ID NO: 566 - DNA, 861 bp, Oryza sativa
atggcgctagtgcaggtgggtatggggttgggccgcgtcgtcctcctcgtcggcgccggcatggccggctcggtcgtcatccgcgacggccgcttcgccgacttcgtcgcggggctccaggaggctctgcgcgacaacgacggcggcggaagcggcagcggcggcggcgtcatcgatcaaatcgaagaagccgtcaagaaggcgactatggaggttaatcagatgataagtcaaccagttactgtcattactgtagatcctgcagttgtgacaacgttgatagcacctgctgcagctgctggggcgttgacctatggttacatgcgctggaaaggcatatctattgctagtctgatgtatgtcaccaagcaaaatatggctaatgctgttgcaagcatgaccaagcatttggaacaagtgcagagctctcttgcagctgctaaaaggcacttaacccagcgcattcaacatttggatgataagttggatcagcagaaacagatttccgggcaaataaaagaggaggttactggtgcacgattgaaactccaggatattggttccgaaatgcaaaagatcaaacaagtggctcatggcctgggtggaaagttggattcaattgaagcaaaacagaactattcattggccggtgtgatgtacctcgtcgaattcatagagcaaaacggtgggaggttgcctcgtagcgtggaacacttgcaacgaactgccaggctctctggaattactggagaccaaaagcagctgcaggggctcggtcagttgctggcgatcgagtcggcgactcctgtaggaagtggacttcactgtacctcggcacggttattcaaggcagtggcatga

SEQ ID NO: 567 - protein, 286 aa, Oryza sativa
MALVQVGMGLGRVVLLVGAGMAGSVVIRDGRFADFVAGLQEALRDNDGGGSGSGGGVIDQIEEAVKKATMEVNQMISQPVTVITVDPAVVTTLIAPAAAAGALTYGYMRWKGISIASLMYVTKQNMANAVASMTKHLEQVQSSLAAAKRHLTQRIQHLDDKLDQQKQISGQIKEEVTGARLKLQDIGSEMQKIKQVAHGLGGKLDSIEAKQNYSLAGVMYLVEFIEQNGGRLPRSVEHLQRTARLSGITGDQKQLQGLGQLLAIESATPVGSGLHCTSARLFKAVA

SEQ ID NO: 568 - DNA, 861 bp, Oryza sativa
atggcgatggtgcaggccggcatgggcctcacccgcgtcgttgtcctcatcggcgccgggatggccggctccgtcgtcctccgcaacggccgcctctccgagatcctcggcgagctccaggagatactggacaagggggagaaggggaaagacggagaagggggcgggggcgccgacatgacggacgcgctcactagacaggtgcgcaacttggctatggaggttaaacaacttgcttcttcccgtggatctataactgttcttaatggaggttctggtcaaacaggggtgtcaggtttgatagtacctgcagcaactgttggagcactcggttatggttacatgtggtggaagggcatctcctttgcggacctaatgtatgtgactaagcgtaacatggcaaatgctgtttccagtatgactaagcatctggagcaagtgcaaacctctcttgctgctgctaaaaggcatttgactcagcgtattgaaaggttggatgataaattggatcagcaaaaggcgctttctggacaaataagagatgatgttactgatgcacgactgaagcttgagaatattggttcagaaattaagaacatcaaacaattggtttggggtctggatgaaaaaatggattcgatggaagccaaacagaacttttcatgtgctggtgtgatgtacctctgccaatttattgagcaaaatggtggaaagctgccagaacgcctggaaggctcaaaaatggctgggaagcgttttggaagccaaaatctcatacaggggttgcaactggccatagaaacagggaattttgacaaggaaacgttcaatgcacttaagaacaactctgattcaagataa

SEQ ID NO: 569 - protein, 286 aa, Oryza sativa
MAMVQAGMGLTRVVVLIGAGMAGSVVLRNGRLSEILGELQEILDKGEKGKDGEGGGGADMTDALTRQVRNLAMEVKQLASSRGSITVLNGGSGQTGVSGLIVPAATVGALGYGYMWWKGISFADLMYVTKRNMANAVSSMTKHLEQVQTSLAAAKRHLTQRIERLDDKLDQQKALSGQIRDDVTDARLKLENIGSEIKNIKQLVWGLDEKMDSMEAKQNFSCAGVMYLCQFIEQNGGKLPERLEGSKMAGKRFGSQNLIQGLQLAIETGNFDKETFNALKNNSDSR

SEQ ID NO: 570 - DNA, 861 bp, Taraxacum officinale
atggcgatgcaagctggcatggggttttctaggatcgttatcctagtcggagcaggttacaccggtacattgctgataaaaaacgggaagctttctgatgtattgggcgaacttcagggtttagtgaagggctatgagggaaaggaaggatatggagctgaaggtgattactcagacgccattgctagccaggttcgtagattagctatggaagttagacagctggcttcttcccgccaaatcactgttcttaatggcggttctgctggtaatatgacatctctggtggtacctgctgctgcattaggagcagttggctacggatacatgtggtggaagggaatttcattttcagacctcatgtatgttacaaagagtaacatggcaaatgcggtttcaaatttgacaaaaaatcttggacaagttacagatgctatagctgcagcaaagaggcatttaacccaaaggattgaaaacttggatgggaaactggatgatcaagttgaaatatcaaaactaattaaaaacgaggtgactaatgttcgtggtgatgtttcacaaatagggtatgacttggattcactaaataaaatgatatccggtttgaatggaaagataatgacattggaagaaaaacaagatatgactaatcttggagtgtggtacctctgcaatatggctgatggaaacaaattatccgggacagcaaaggaacaatttaaacttgctggcaagtcttttggtggtcattctggtggatttctgtccattgatggtgtgaaggagattgctgaaactttagatccagaaaaagaatccagaatgttgaccaggagacattcggtcaagttggtggtatag

SEQ ID NO: 571 - protein, 286 aa, Taraxacum officinale
MAMQAGMGFSRIVILVGAGYTGTLLIKNGKLSDVLGELQGLVKGYEGKEGYGAEGDYSDAIASQVRRLAMEVRQLASSRQITVLNGGSAGNMTSLVVPAAALGAVGYGYMWWKGISFSDLMYVTKSNMANAVSNLTKNLGQVTDAIAAAKRHLTQRIENLDGKLDDQVEISKLIKNEVTNVRGDVSQIGYDLDSLNKMISGLNGKIMTLEEKQDMTNLGVWYLCNMADGNKLSGTAKEQFKLAGKSFGGHSGGFLSIDGVKEIAETLDPEKESRMLTRRHSVKLVV

SEQ ID NO: 572 - DNA, 876 bp, Festuca arundinacea
atggcgatggcgcaggcgggcttcggcgtcacccgcgtcgtgatgctcatcggcgccggcatggccgggtccgtcgtcctccgcaacggccgcctctccgagatcctcaccgagatgcaggagtttctggagaaggcggacaaggggaaggaaggtggtggtggtggtgcggaccacggcatcagtgacgcgctcaacgaggtgcgcctcctagccatgcaggtacggcagctcggttctccacgctccataactgttctcaacggaggttctggacaatcaggactatcgggactaatagtacctgcagcaactgttggggcactcggttatggttatatgtggtggaaaggaatctcttttgcggacttgatgtatgtcaccaagcaaaacatggcaaacgttgtttcaagtatgactaaacatctggagcaagtccagacctctcttgctgctgctaaaaagcatttgacacaacgtattgagaagttggatgacaaattggatcagcaaaaggcgctttctgggcaaataaaagatgatgttactggcgcacgattaaagcttgagactattggttcagagattaagaacatcaaggatttggtctggggtctggatgagaagatggattcaatggaagctaaacagaatttttcatgcgccggtgtgatgtacctctgccaattcatagaacaaaatggcgggaagctcccagaacgcctggaaggcattaagccatctgcgaagcgtttttcgtcaattggcatacagggtttgcaactagccatagaaacaggagatttcagtgaattcagcaatgctgattccactgacaagataagcaggtccaactcgttgaagtctgtcagctga

SEQ ID NO: 573 - protein, 291 aa, Festuca arundinacea
MAMAQAGFGVTRVVMLIGAGMAGSVVLRNGRLSEILTEMQEFLEKADKGKEGGGGGADHGISDALNEVRLLAMQVRQLGSPRSITVLNGGSGQSGLSGLIVPAATVGALGYGYMWWKGISFADLMYVTKQNMANVVSSMTKHLEQVQTSLAAAKKHLTQRIEKLDDKLDQQKALSGQIKDDVTGARLKLETIGSEIKNIKDLVWGLDEKMDSMEAKQNFSCAGVMYLCQFIEQNGGKLPERLEGIKPSAKRFSSIGIQGLQLAIETGDFSEFSNADSTDKISRSNSLKSVS

SEQ ID NO: 574 - DNA, 882 bp, Sorghum bicolor
atggctgtggtacaagccggcatgggcctcacccgcttcgtcctcctcgtcggcatcggtgctgtcggcggtcccatcgccgcccgcaacggcaaactcggcgagctcctccgcgatcttcagaagtctcttacagagaagggggcaggagtggaatcgcccgccatcaacgacgacactaacaacatagtggctaaagcacttgctctattggaaaaggagattcatcacattgggacaagacctattattcaggtggatacaggaaacggagctggatcagctttgatagtacctgctgctgctgtaggaacagtcggctactgttacatgtggtggaaaggaatctccttttctagcttgatgtatgtcactaaacgcaatatggctaatgctgttgcaagcatgactaagcatctgcaacaagtgcagagctctcttgccgctgctaaaaagcaattatcacagcgcattcagcgcgtggatgataaattggaacagcagaaggagatttcggtgcaaataaaagatcaggttactggtgcaaagttgaaaatcaagaacattggatcagacatgaataaaataaaaaatatggttacgggcctgaatgagaagatagattcaattgaagcaaaacagaattattcacgtgtggccgtggattatctctgccaattcatagaaaaaagggttgacaagctgccggaacagctggaaggattgcaacaaacagtaaagcgtataggatacaagaactcagagttgccaccggggctgggggggttcgggcaactgctgtccaccgaatcagcaaacccttgcagtagaagaatgcttcgatcagcaggcctgaactctgcacgtctgattctgccttga

SEQ ID NO: 575 - protein, 293 aa, Sorghum bicolor
MAVVQAGMGLTRFVLLVGIGAVGGPIAARNGKLGELLRDLQKSLTEKGAGVESPAINDDTNNIVAKALALLEKEIHHIGTRPIIQVDTGNGAGSALIVPAAAVGTVGYCYMWWKGISFSSLMYVTKRNMANAVASMTKHLQQVQSSLAAAKKQLSQRIQRVDDKLEQQKEISVQIKDQVTGAKLKIKNIGSDMNKIKNMVTGLNEKIDSIEAKQNYSRVAVDYLCQFIEKRVDKLPEQLEGLQQTVKRIGYKNSELPPGLGGFGQLLSTESANPCSRRMLRSAGLNSARLILP

SEQ ID NO: 576 - DNA, 888 bp, Ipomoea nil
atggcgatgcaagctgggatgggcttatctaagatagtcttcttactgggagcagggtacactactaccgtgcttctgaataacggtaaattgtcgaatgtgctgggagaacttcagaatttggtgaaaaattatgaaaaatctgtggaagatggtggagaaactgatgcggtacttgctgcgcaggttcgacggttagctatggaggttcgatcactggcctccgcacgctcaatcactgttctcaatgggggttctaatggtaacataacaaatctggtggttcctgctgctgctgtaggggccttgggctatggatacatgtggtggaagggtatctcattctctgaccttatgtatgtaacaaagcgtagtatggcaactgctgttgaaaacttaacaaagcatctggagcatgtttctgatgccttagctgcaacaaagaggcatttgacgcagagaattgagaatgtagacgggaaactggatgaccaaattgagatatcaaaacaaattcggactgaggttaatgatgttcgtggtgatctttctcaaattggttttgatttggattcactacacaggatggtgactggcctggatggcaagcttctttctttggaagaaaagcaggagcttgcaaatgctggtgtcatgtatctctgtggtattgtcaatggtcaaagtgtaaaaatgcctgaaaaagtccaggaacagctccgtattggtggtaactcagtgggttccctcatgggtctcaaagacatcctggacgtctatgggcaaggagatgaggttaggctcataacagatggcagtgcactggatattgccgacaagtctattgttccaccaaaaagcatgatgaggacggcatcagcaaagtag

SEQ ID NO: 577 - protein, 295 aa, Ipomoea nil
MAMQAGMGLSKIVFLLGAGYTTTVLLNNGKLSNVLGELQNLVKNYEKSVEDGGETDAVLAAQVRRLAMEVRSLASARSITVLNGGSNGNITNLVVPAAAVGALGYGYMWWKGISFSDLMYVTKRSMATAVENLTKHLEHVSDALAATKRHLTQRIENVDGKLDDQIEISKQIRTEVNDVRGDLSQIGFDLDSLHRMVTGLDGKLLSLEEKQELANAGVMYLCGIVNGQSVKMPEKVQEQLRIGGNSVGSLMGLKDILDVYGQGDEVRLITDGSALDIADKSIVPPKSMMRTASAK

SEQ ID NO: 578 - DNA, 888 bp, Solanum tuberosum
atggctatgcacgctggagtaggcttaacaaagatcgtcttcatcgtcggagcagggtatactggtactttgttgtttaaaaacggaaaattatcggatgtgataggcgagcttcagaatttggtcaaaagttatgaaaagacaggggaatcagatggtggagaatcggatgtcattgctgcacaggttcgtagattggcaatggaggttcgacaattggcttccgcacgatcaattactgttcttaatggaagttctagtggtaactggacatctctggtaatgcctgccgctgtagcaggtgccttaggttatggatacatgtggtggaagggtttgtcattctctgaccttatgtatgtaacaaaaaagaatatggcaactgctgtttcaaatctgacaaaacatctcgataatgtctcagaggcccttgctgctacaaagaggcacttaacacagcgaattgagaatgtggatggaaaattggatgagcaaatggagatgtcaaaactaattaggagtgaggttaatgacgtgcatggtgatctgtcccagattggttttgatctggatcaactaaataggatggtttctggtctggatggcaagttactttctttggaaggcaagcaggtccttgcaaatgctggtgttatgtacctgtgtaattttgtcaatggagaaagggtgaagattcctgagacactgcaggaacaacttacaattgtgggcaactctacacctactctgatgggccttaaagaacttgcggactccttaccggaagtaaacagcaacagatttattacagatggcattactcaagatggtattgataaattgaagccgcctagacccctgttgaggactgcctctaccaagtgctga

SEQ ID NO: 579 - protein, 295 aa, Solanum tuberosum
MAMHAGVGLTKIVFIVGAGYTGTLLFKNGKLSDVIGELQNLVKSYEKTGESDGGESDVIAAQVRRLAMEVRQLASARSITVLNGSSSGNWTSLVMPAAVAGALGYGYMWWKGLSFSDLMYVTKKNMATAVSNLTKHLDNVSEALAATKRHLTQRIENVDGKLDEQMEMSKLIRSEVNDVHGDLSQIGFDLDQLNRMVSGLDGKLLSLEGKQVLANAGVMYLCNFVNGERVKIPETLQEQLTIVGNSTPTLMGLKELADSLPEVNSNRFITDGITQDGIDKLKPPRPLLRTASTKC

SEQ ID NO: 580 - DNA, 891 bp, Aquilegia sp.
atggctttgcaaactggaatcgggctttctagactcgttttcatagttggagctggttatactggtacgattgtgttgaagaacggtaaagtatctgatttattagctgaacttcagaaggtgatacagggatgggagaaaggtgattcaaacaataatggttctgatgctttatatgatcaagtgcgtcagttacaaatggcgatacaaaatatggggtcacgccaaattaccgttctgaattctgattctagccagatggggatatcatctttggtactgccagctgcaaccttgggattagtgggatatggatacatgtggttgaagggtttatccttctcagatcttatgtatgtaaccaagcataacatggcaaatgctgttgcaaacatgacaaagcatctggaccaagtgtctgttgcccttgctaaagtaaaaacgcatttaactcagcgacttgagaacttggatggaaaacttgatgagcagaaggagatgtcaaagttaatcaagaacgaggttacagatgtccgtgctgatctttctcaaattggcagtgacatggatgaactgcatagaatggttgctggtctggatgggaagataatgtccttggaagacaagcaggatattgcaaatgctggagtgtattacttggtcaattttgttgcttcaaaggacgccaagatgtctgaattacttaaggaattgcctaaacctgtcaagcctcgccttggattttccgagactccaagtttgaagggtcttaagcaaattgcggacaccatatcgtctggaaatcttgagaaatctgttgtgcaaaatgatcttgataagatcgacattgtcccaagaagtttgactagggttcaatccataaagtgttga

SEQ ID NO: 581 - protein, 296 aa, Aquilegia sp.
MALQTGIGLSRLVFIVGAGYTGTIVLKNGKVSDLLAELQKVIQGWEKGDSNNNGSDALYDQVRQLQMAIQNMGSRQITVLNSDSSQMGISSLVLPAATLGLVGYGYMWLKGLSFSDLMYVTKHNMANAVANMTKHLDQVSVALAKVKTHLTQRLENLDGKLDEQKEMSKLIKNEVTDVRADLSQIGSDMDELHRMVAGLDGKIMSLEDKQDIANAGVYYLVNFVASKDAKMSELLKELPKPVKPRLGFSETPSLKGLKQIADTISSGNLEKSVVQNDLDKIDIVPRSLTRVQSIKC

SEQ ID NO: 582 - DNA, 912 bp, Vitis vinifera
atggcgatgcaaactggtgtaggggtttcaaagatcctgatcctggttggagcaggatacaccagtacgatcttgctcaagaatggcaaattgtcggatatattgggtgaacttcagtcattggtgaaaggattggagaaaaaaggggattcatcaaatggtgaagctgactattctgatgctattgctgcccaggtccgtcggttagcaatggaggtcaaacaacttgcctcagctcgacagataactgttctaaatgggaattctggccaaattggcaacataacatcacttgcaatcccagctgccaccttgggggcattgggatatggttacatgtggtggaagggtctttcaatatcagatcttatgtatgtaacgaagaagaatatggaaactgcggttacaaacttgaaaaagcatctggagcatgtctcagacgctctttctgcaacaaaaaggcatttgacacagcgaattgagaatttggatggaaaactggatgagcagaaggagatctcgaagttaattaagaatgaggttactgaagctcgtggtgatatttctcaaattggctttgacttggattcactacaaaggatggtctctggattggatgggaagataggttcattggaatataagcagaattttgcagttgagggtgtggtgtacctgtgcaacgctgttaatggaagaagtgtaccaatgtctgaaactatgctgaaacagcttaaactacctggcaagtcccacggtttactcacatctacagaagctccaagtttccagggtcttaaggagattgcaggcagtataatatctgaaaattccagatcttcaaatggtatcgtgcaagatggtgttgataaattggatgatcagccaaggagcctgacaaggtttgaatga

SEQ ID NO: 583 - protein, 303 aa, Vitis vinifera
MAMQTGVGVSKILILVGAGYTSTILLKNGKLSDILGELQSLVKGLEKKGDSSNGEADYSDAIAAQVRRLAMEVKQLASARQITVLNGNSGQIGNITSLAIPAATLGALGYGYMWWKGLSISDLMYVTKKNMETAVTNLKKHLEHVSDALSATKRHLTQRIENLDGKLDEQKEISKLIKNEVTEARGDISQIGFDLDSLQRMVSGLDGKIGSLEYKQNFAVEGVVYLCNAVNGRSVPMSETMLKQLKLPGKSHGLLTSTEAPSFQGLKEIAGSIISENSRSSNGIVQDGVDKLDDQPRSLTRFE

SEQ ID NO: 584 - DNA, 924 bp, Helianthus annuus
atggcgatgcaagcaggcatgggattctctaagatcattatcctagtcggagcagggtatactggtacgttgatgctgaataacggtaaattatctgatgtgttgggcgaacttcagaaattggtgaaaggatatgaacaaggacagggggatggaggtgatgctgatcatgctgatgcaattgctgcacaggttagaagattagcgatggaggttcggcagctggcttcttcgaggcagatcactgttctgaatggtggtgctggtggtggtgcaacgtctttagtggtaccagctgctgctgtgggtgctgcgggttatggatacatgtggtggaagggttattcattctcagacctcatgtatgtgacaaagaaaagcatgtcaactgctgtttcaaacttgacaaagcatctggaacaagtgtcagacgcccttgctgctgccaagaaacatttgacacagaggattgagaagttggatggaaaaatggaccagcaagtggaaatatccaagttgattagaagtgaggtgggtgatgtccgtgatgatctttcccaaatcggctatgacttggactcgctaaatcaaatggtttccggtttgaatggcaagataatgacattggaagaaaaacaggatctaactaaccttggagtgtggtacctctgcaacaaggctgaaggaactaagatgtctggcaaggcacaagaacaactcaaacttgccggcaaatcctttgccggttatctcacatcaggggggatgctaaatatcgagggcatgaaggaaatagcagacaatttagattcaagtgacgttaataagtcgccaacaactggcatatcagaagatatttccttcgggtctgacagtcaaccgagaagattgaccaggagaaatactgtcaagttcagctcttga

SEQ ID NO: 585 - protein, 307 aa, Helianthus annuus
MAMQAGMGFSKIIILVGAGYTGTLMLNNGKLSDVLGELQKLVKGYEQGQGDGGDADHADAIAAQVRRLAMEVRQLASSRQITVLNGGAGGGATSLVVPAAAVGAAGYGYMWWKGYSFSDLMYVTKKSMSTAVSNLTKHLEQVSDALAAAKKHLTQRIEKLDGKMDQQVEISKLIRSEVGDVRDDLSQIGYDLDSLNQMVSGLNGKIMTLEEKQDLTNLGVWYLCNKAEGTKMSGKAQEQLKLAGKSFAGYLTSGGMLNIEGMKEIADNLDSSDVNKSPTTGISEDISFGSDSQPRRLTRRNTVKFSS

SEQ ID NO: 586 - DNA, 633 bp, Ananas comosus
atggcgatgcaaagcggaatcgccacctccaaggtcctcatcctcgtcggagcaggattgaccggttcgattatactgaagaatgggagattatcggatgtattagcagagcttcaggaattagtaaaaggtgtaaatgaaggggaagcatcttcaggccactatgacacggctcttcttgcggctcagattcgacatttggctcaagaggttagggatttggcactgtctagacccgtgactgtgttgactggggattcaaattcaagggggaatttggcatcttacatagttccagctgctacagttggagcaatgggttattgctacatgtggtggaaggggtggtctttctctgatgtcatgtttgttacaaaacgcaacatggctaatgctgttgctaatgtatcaaaacaactggagcaagtatcggcagccctagccgcaacaaaaagacatctgactcaacgacttgaaaacgtggatgggaaacttgatgaacagagggagatttctaaaggcattatgaatgaggtcaatgaagttaggactgacctttcccaaatcggatttgatattgagtcgatccaaaaaaatggttgctggactggaaggaaagatcggattgcttga

SEQ ID NO: 587 - protein, 210 aa, Ananas comosus
MAMQSGIATSKVLILVGAGLTGSIILKNGRLSDVLAELQELVKGVNEGEASSGHYDTALLAAQIRHLAQEVRDLALSRPVTVLTGDSNSRGNLASYIVPAATVGAMGYCYMWWKGWSFSDVMFVTKRNMANAVANVSKQLEQVSAALAATKRHLTQRLENVDGKLDEQREISKGIMNEVNEVRTDLSQIGFDIESIQKNGCWTGRKDRIA

SEQ ID NO: 588 - DNA, 714 bp, Triphysaria sp.
atggcgctgcaaactggcgtcgccgcctctaagatccttatcctcgtcggcgcaggtgtaactggatcagttgtcttgaggagcggacacttatctgaattgatttctaaccttcaagtgttgataaaaagagtcgatgaagctgagacatcacctgggaattatgatgccgctattctagtagctcaggttcggcagttggctaaagagatcaaggagttaagtttatccaatcctgtcaccatatttaatgggaattcatcctccagcggaagctatgcttcatatatattgcctacagcagctcttggtgcaatgggatactgttacatgcggtggaagggattttcgttctctgatattatgtatgtcaccaagaataacatggcaaatgctgtagaaaccgtctcgaagcagttagataatgtttctgaagcattggcattgactaagaggcatttgacaaaaaggttggaaaacctggactggaaaatggacgagcagagggaaatatccaaacttgtggccaatgacgtcactgaagtgagatctaatcttaaccaaataggacttgacattggtttgatcaatgagatcgtatctggcttggaaggaaaactcgagcttcttgaaagtaagcaggatatgaccaattcgggtttgtggtatctatgcaatgcggctggaaatattaaagatgatcagaatttctaa

SEQ ID NO: 589 - protein, 237 aa, Triphysaria sp.
MALQTGVAASKILILVGAGVTGSVVLRSGHLSELISNLQVLIKRVDEAETSPGNYDAAILVAQVRQLAKEIKELSLSNPVTIFNGNSSSSGSYASYILPTAALGAMGYCYMRWKGFSFSDIMYVTKNNMANAVETVSKQLDNVSEALALTKRHLTKRLENLDWKMDEQREISKLVANDVTEVRSNLNQIGLDIGLINEIVSGLEGKLELLESKQDMTNSGLWYLCNAAGNIKDDQNF

SEQ ID NO: 590 - DNA, 807 bp, Medicago truncatula
atggccttacagatggcacctgcctcctccaaggttctcatcctcgttggagccggtttggctagttctgttgtcatgaatggtggccaattgtccgatgttattgacaagcttaaggatgtgcttaagttagttgatgatcaggttaagatttcaacctccggatatgacaccgccgttattgctgctcaggttcggcaactagcacaagaaatcgcggagttgtccttatctaggtctaagaccatctataatgacaattcatctagagggggtcttgctccttacatattacctactgctgcaataggagctgtgggatattgttacatgcggtggaggaattggtcattttctgatgtaatgtttgcgacaaagaagaatatgactaatgctgttgcaactgtgtcaaagcaactagagaatgtacatgaaacattagcatcaacgaaaaggcatataataaagaggttggatggtcttggcttggaggtggaaaagcaaaatgagataagcaaacaaattgcagaagatgtgaaggaattgaaggcatttctttctcagattgggtgtgatgttgaacttataaatcaaatgatgtctgagctggaagataagctcaagcttgttgaaggcaatcaggacattacaaattcaggtatatggtatctatgcaaatttattgaagacataaacaatgggccaaatggtggagtttacaagggacttgcagaacttacaaaggcacttgaggagaaagccccccaaatgattatggagaagatatatgagaaagttgagctttag

SEQ ID NO: 591 - protein, 268 aa, Medicago truncatula
MALQMAPASSKVLILVGAGLASSVVMNGGQLSDVIDKLKDVLKLVDDQVKISTSGYDTAVIAAQVRQLAQEIAELSLSRSKTIYNDNSSRGGLAPYILPTAAIGAVGYCYMRWRNWSFSDVMFATKKNMTNAVATVSKQLENVHETLASTKRHIIKRLDGLGLEVEKQNEISKQIAEDVKELKAFLSQIGCDVELINQMMSELEDKLKLVEGNQDITNSGIWYLCKFIEDINNGPNGGVYKGLAELTKALEEKAPQMIMEKIYEKVEL

SEQ ID NO: 592 - DNA, 813 bp, Lactuca sativa
atggcaatgcaaaccggagttagcacctccaaagttctgatcctcgtcggagcaggtctgactagttctgttatcttgagaagtggaaagctttctgatgtaatatcagagcttcaggagttgatgaaaggtgttaatgaagttgaaatcacacctggaaagtatgatagtgcagctcttgcagctcagattcgacaattggcacaagagattcgcgagttgtccctctcacgtcctgttacaatctttaatggaaattctacttctagtgggggttactcatcttatttgatgccagctgcagcccttggagcaatggggtattgttatatgtggtggaaaggtttgtctttgtctgatgttatgtttgtaaccaagaacaatatggcaaatgctgtgtccacagtttcaaaacagttagagaatgtatctgatgcattagcttctacaaagagacatttatcaaagagacttgaaaacttggactggaaattagatgaacagaaggaaataagtacacttatttcaaatgatgtaaatgatgtaaggtcgaatcttaatcaaataggttatgacattgatatgatccatcaaatggtggctggacttgaaggaaaaatagaccttattgaaggaaagcaggatgtgacaaattcagggttatactatttatgtcaagtggctggaggaatcaaagatgggataaatgctaagctttttcaggatattgaagctaagcttggagaaacatcaaaaatcacatttgaggacacttcttttaaagggacttcagtttcttacagaatcaaatga

SEQ ID NO: 593 - protein, 270 aa, Lactuca sativa
MAMQTGVSTSKVLILVGAGLTSSVILRSGKLSDVISELQELMKGVNEVEITPGKYDSAALAAQIRQLAQEIRELSLSRPVTIFNGNSTSSGGYSSYLMPAAALGAMGYCYMWWKGLSLSDVMFVTKNNMANAVSTVSKQLENVSDALASTKRHLSKRLENLDWKLDEQKEISTLISNDVNDVRSNLNQIGYDIDMIHQMVAGLEGKIDLIEGKQDVTNSGLYYLCQVAGGIKDGINAKLFQDIEAKLGETSKITFEDTSFKGTSVSYRIK

SEQ ID NO: 594 - DNA, 900 bp, Pinus taeda
atggctaccaggctattgatccttgtgggcgcaggtctgaccggatctattgttttaaaggatagccgcttatctgatatcctttcagatctccagggactactggtaaagcaagcaggtgcaggggaatcatccaataatggttcagataactctgctgctgttgcttctcaggtgcgtcgtctggcacaggaagtaagagagctggctcaatcgagatcaataacagttcttaatgggaactctggtcaaagtggtaacctgtcaagtctagtagtgccagttgctgcagtgggggccatgggctactgctatatgtggtggaaaggatggtcattctcagattggatgtatgtaaccaagcgtaacatcgcaaatgttactgcaagctttaacaaacagttggatcaagtttcttcagctcttgccgcggtaaaaaagcacttgacccagaggcttgaaaatgtggatggaaagctagatgagcaaaaggaaatatcaaaattaatcaagaatgaggtatttgaagtgcgtggagaccttacacagattggttttgacatagatgcaattcaaaaaatggtttctggcctggaagggaagattgttacattagaagataaacaggattttgcaaatgctggtgtatggtatctttgccaatttgtgggaggagtgaaagatgcatccatgccacaatttatacaggacttcccagcaagagctcgaatagaacgtccagcccctcagttcactgatggtaacagtttgaagggcctccagtacatcgcagacacaattcagtcagggactgttgaccaaacaaatgtaaatgcaattttacagaatgacattactatctctgccaacaaaacgattcgaaaggagccgtcaaattag

SEQ ID NO: 595 - protein, 299 aa, Pinus taeda
MATRLLILVGAGLTGSIVLKDSRLSDILSDLQGLLVKQAGAGESSNNGSDNSAAVASQVRRLAQEVRELAQSRSITVLNGNSGQSGNLSSLVVPVAAVGAMGYCYMWWKGWSFSDWMYVTKRNIANVTASFNKQLDQVSSALAAVKKHLTQRLENVDGKLDEQKEISKLIKNEVFEVRGDLTQIGFDIDAIQKMVSGLEGKIVTLEDKQDFANAGVWYLCQFVGGVKDASMPQFIQDFPARARIERPAPQFTDGNSLKGLQYIADTIQSGTVDQTNVNAILQNDITISANKTIRKEPSN

SEQ ID NO: 596 - DNA, 939 bp, Helianthus paradoxus
atggcgatgcaaactggagttagcacctccaaagttctgatcctcgtcggagcaggtctgactagttctgttatattaaggagtggaaaactctcagatatattatcagagctccaggagttaatgacgggcgttaacgaagttgaaatccaacctggaaagtacgatagtgccgctcttgcagcacagattcgacaattggcacaagaaattcgggagttgtctctctctcgacctgttactattttcaatggagattctagttctagtggaggctactcatcctacttgatgccagctgcagcactaggagcaatgggatattgctatatgtggtggaagggtttatctctttctgatgttatgttcgtaactaagagcaatatggcaaatgctgtatcgacggtttcaaaacaattagagaatgtttcagatgcgttagtttctacaaagagacatctatcaaaaagacttgaaaacttggactggaagttagatgagcagaaggaaataagtaaactgatcgcagatgatgtaaacgatgtgaagtccaatcttaatcagataggttacgacatcgatatgatccatcaaatgatggccggattggaaggaaagcttgatcttatcgaaggaaaacaggatatgaccaattcaggtctatactacttaatgcaagtagctggtgggattaaagatggaataaacgctaagctctttaaggatattgaagctaagataggagaacaatcaaaaattacatttgaggaaacttcgttaaagggccttcagtttcttacggatgctaatgattcggccgcaaaagagaatcctgtgctgactaaaatgagcactaaggtaaacaaagatcaagataacactaaatcaagatttcgtaggccttacccggtgggtttgtcatttgctaaagatatatga

SEQ ID NO: 597 - protein, 312 aa, Helianthus paradoxus
MAMQTGVSTSKVLILVGAGLTSSVILRSGKLSDILSELQELMTGVNEVEIQPGKYDSAALAAQIRQLAQEIRELSLSRPVTIFNGDSSSSGGYSSYLMPAAALGAMGYCYMWWKGLSLSDVMFVTKSNMANAVSTVSKQLENVSDALVSTKRHLSKRLENLDWKLDEQKEISKLIADDVNDVKSNLNQIGYDIDMIHQMMAGLEGKLDLIEGKQDMTNSGLYYLMQVAGGIKDGINAKLFKDIEAKIGEQSKITFEETSLKGLQFLTDANDSAAKENPVLTKMSTKVNKDQDNTKSRFRRPYPVGLSFAKDI

SEQ ID NO: 598 - DNA, 945 bp, Euphorbia esula
atggctcttcagactggcgtctccacctccaaagttctcatcctcgccggtgcagcaggtttgactagttcaattattttgagaaacggaccgttgtctgatctcgttgctcagcttcaagaattacttcagggtgttaatcaagttgagcttgctccctacaaatatgatacctcacttcttgctgctcagattcgccaattggcacaagagattaaggagttgtcgttatccaatcccgtgacaatctataatggaaatccttctactggtgggagttttgcatcttatctagtgccagctgctgcagttggagccatgggatattgttacatgtggtggaagggcttgtcagtttctgatgtaatgtttgttacaaaacaaaatatggcaaatgctgtagcaactgtgtctaagcaattggagaatgtatcagagactttatcttcaacaaagagacatctgtcaaagaggctggaaaacctggattggaaaatggaggagcagatagaaatatctaatctcatttcaaataatgtagacgatatgaaaacaaacctatcccaaattggatttgatgttgaaacaatccatcaaatgatatctgggctggaaggcaagcttgagcttctggaaaacaagcaggatgcaacaaactcaggcctctggtatctatgtcagtttgctgggggctttaaagatgagccgggcacaaaagtttataaggaactaggaactaagctagcaaacccagcagtggaatacgaggatacttctctcaagggccttcggtttatcgctgatgctaaagcgctagtttcagttgagaaaacaagaggagaacaagtggaaaaaaatgaaggcggtgaaaaaataaaaagcatgaaagcaagaatacacaggtcctatccagttggtctatctttgactcgggacttgatatga

SEQ ID NO: 599 - protein, 314 aa, Euphorbia esula
MALQTGVSTSKVLILAGAAGLTSSIILRNGPLSDLVAQLQELLQGVNQVELAPYKYDTSLLAAQIRQLAQEIKELSLSNPVTIYNGNPSTGGSFASYLVPAAAVGAMGYCYMWWKGLSVSDVMFVTKQNMANAVATVSKQLENVSETLSSTKRHLSKRLENLDWKMEEQIEISNLISNNVDDMKTNLSQIGFDVETIHQMISGLEGKLELLENKQDATNSGLWYLCQFAGGFKDEPGTKVYKELGTKLANPAVEYEDTSLKGLRFIADAKALVSVEKTRGEQVEKNEGGEKIKSMKARIHRSYPVGLSLTRDLI

SEQ ID NO: 600 - DNA, 951 bp, Ipomoea nil
atggcgatgcagaccggtgtcgctgcctccaaagttctcgtattggtcggcgcaggcttgactgggtcaatagtattaaggagtggacgattgtctgatttaatttcacagcttcaggagttgattaaaggtgtaaatgaggccgaaacatcacctgggaaatatgatgctgctcttctagctgctcagattcgacagttggcacaagagattaggcagataagtatcacaagtccagcaaccatcttcaacagtggttcttccgataggagttatgcttcttaccttcttccggctgctgcaattggagcagtgggatattgttacatgaagtggaagggttggtcattctcagatgttatgtttgttacaaagagtaatatggcaaatgctgttgcttctgtctcaaagcagttagagaatgtatctgatgcattggcttctacaaagaggcatctgtcaaaaaggcttgaaaacttggattggaagctggatgagcagaaggagatgtcaacgcttattgcaaatgatgtaaaggaagtaaagtcaaatctaaatcaaattggatacgacattgacttaattcatcagatggtgtctggattggaaggcaaaattgaacttcttgagaataaccaggatatcactaattctggtgtgtggtatttgtgccaagtggctggggagattgaaagtggtcagaatgctaagcttattgaggatgttggtgctaagttaatacagcattcaaaattgttacctatagaaaattcagtaaaggggcttcagttcattgttgaatctggtgaatcaagtgcaaaccaagatgcagacgtaaatgcaagtaaaatagctgattctccccaagtcggtgctaatcctcccaaaattgttacagctaacaaaaccaagattcacaggtcctatcgggttgggttgggttgtctttga

SEQ ID NO: 601 - protein, 316 aa, Ipomoea nil
MAMQTGVAASKVLVLVGAGLTGSIVLRSGRLSDLISQLQELIKGVNEAETSPGKYDAALLAAQIRQLAQEIRQISITSPATIFNSGSSDRSYASYLLPAAAIGAVGYCYMKWKGWSFSDVMFVTKSNMANAVASVSKQLENVSDALASTKRHLSKRLENLDWKLDEQKEMSTLIANDVKEVKSNLNQIGYDIDLIHQMVSGLEGKIELLENNQDITNSGVWYLCQVAGEIESGQNAKLIEDVGAKLIQHSKLLPIENSVKGLQFIVESGESSANQDADVNASKIADSPQVGANPPKIVTANKTKIHRSYRVGLGCL

SEQ ID NO: 602 - DNA, 954 bp, Arabidopsis thaliana
atggcgatgcaagccggtgttcagacctctaaggtccttatcctactcggcgcaggtgtatctggttcgatcgtattgagacatgggaggttgtctgacctaatagcccaacttcaagacttactcaatggtgctcaaggagttgaaagcactccttttaagtatgacggtgcactccttgctgctcagattcgacagcttgcaaacgagatcaaagaactaactatgaccaatccagttaccatctttaatggagattcaaactccagtggctatgcatcttacctggttccagcggctgccgttggagctatggggtactgctacatgtggtggaagggctggtcgttttcagatgcaatgtttgtgacaaagaaaaatatggctgatgcggttgcctctgtttcgaaacaactagacgatttgtcagacacattagcgtcaacaaggaaacatctttctcagaagctagcgaccttggattggaaggtggaagagcagaatgagacatctaaaatgatcttaagtgatgttactgagatgagatcaagcatttcgcaaattgggtttgattttaagcaacttaatgaaatgatttctggaatagaagggaagattgaaagtcttgaaagcaaacaagatgtgaccctctctggactatggcatctatgtcaagttgcaggcgttaaagacagcacaagtactaaagtatttcaggatgttggtgagagattacctattgatggaaaaccatccactaatacttctctctctggtctgcggtttctgacggaaggcaaagaggatgcaaatgtaatacacaagccggttatggcgaaagaaattatggtgatgggggaaaaaacaaaagtcactgcagcgggaagaagcagagttcatagagcgtttccaggtggaatatcttgggtacgggatgtttcaggactatcctaa

SEQ ID NO: 603 - protein, 317 aa, Arabidopsis thaliana
MAMQAGVQTSKVLILLGAGVSGSIVLRHGRLSDLIAQLQDLLNGAQGVESTPFKYDGALLAAQIRQLANEIKELTMTNPVTIFNGDSNSSGYASYLVPAAAVGAMGYCYMWWKGWSFSDAMFVTKKNMADAVASVSKQLDDLSDTLASTRKHLSQKLATLDWKVEEQNETSKMILSDVTEMRSSISQIGFDFKQLNEMISGIEGKIESLESKQDVTLSGLWHLCQVAGVKDSTSTKVFQDVGERLPIDGKPSTNTSLSGLRFLTEGKEDANVIHKPVMAKEIMVMGEKTKVTAAGRSRVHRAFPGGISWVRDVSGLS

SEQ ID NO: 604 - DNA, 957 bp, Oryza sativa
atggcgatgcagacggggttcgccacctccaaggtcctcatcctcgtcggcgcagggttgacgagctcgatcgtgctgcggaatggccggctatctgacgtgttggcggagcttcaggagcttatgaaaggtgtaaaccaaggagaaggttcgagtgcctatgacatcgcccttcttcaatctcagattcgaaatttagcacaagaagttagagatttgactatatcaaggcctattaccatattgagtggcaactccgactctggaggcagtttatcctcctacatactgcctgcagctgcagttggagcaatgggttactgctatatgtggtggaagggattgtccttatcggatgtcatgtttgttaccaaacgcaacatgaccaaagctgttgagagtatgtcgaagcaattggatcaagtgtcttcagctttagctgcaacaaaaaggcatctaagtcagcgcctggaaaatttagatgggaaaatggatgagcaagtggaggtctccaaaattattagaaacgaggtgaatgatgtcaaagatgatctgtctcaaattggatttgatattgcagcaatccaacagatggttgctggattggaagggaagatcgagttgcttgataataaacaggatgcaactaatgctggtgtatggtacctctgccaaatagctggaggtctaaaagatggaataaatgccaagttttttcaggaagctaatgaaaaactcaagctcacagagttggctcagtctgaaagaaaggcagtgaaggggcttgaatctgttctggagagcagaaaggaacaaaaggcaatcgactccaaacaaaataccaccgcgataattgacgccgaaaagcccgtgaaaacggtcgatgggcctgtgaaaagcggcgcggtgcacaggtgtagcagaatctcatttcggaaggaaggcctcgctttgtga

SEQ ID NO: 605 - protein, 318 aa, Oryza sativa
MAMQTGFATSKVLILVGAGLTSSIVLRNGRLSDVLAELQELMKGVNQGEGSSAYDIALLQSQIRNLAQEVRDLTISRPITILSGNSDSGGSLSSYILPAAAVGAMGYCYMWWKGLSLSDVMFVTKRNMTKAVESMSKQLDQVSSALAATKRHLSQRLENLDGKMDEQVEVSKIIRNEVNDVKDDLSQIGFDIAAIQQMVAGLEGKIELLDNKQDATNAGVWYLCQIAGGLKDGINAKFFQEANEKLKLTELAQSERKAVKGLESVLESRKEQKAIDSKQNTTAIIDAEKPVKTVDGPVKSGAVHRCSRISFRKEGLAL

SEQ ID NO: 606 - DNA, 960 bp, Aquilegia sp.
atggcgatgcagacgggagtaggaacttccaaagttctcgtcctcatcggcgcaggtttgactggttcggttgtattgaagagtggtcaattatcggatttgatactacagcttcaggatttaatgaatggagtgaatgatgccggagccttatctggaaagtacgatactgctctactcgcagctcagattcgatatttggcgcaagagatcagggaactgacattgtccaggcctgtaacgatcttcaatgaaaattctgggactagcgggaatcttgcatcgtacatagtgcctgctgctgcacttggagcaatgggctattgttatatgtggtggaagggattatcgcttgcagatgttatgtttgtcacaaagcaaaacatggccaatgcagttgcaaatgtctcacaacaattggagcaagtatctgcactgttaagttcaacgaaaaggcatctaagccagaggcttgaaaatttggatggaaaactggaagagcagagggaaacaacaaagctagttatgaatgaggttattggagtgaagtcagatctttttcaaattggatatgatgttgagatcatccagaaaatggtgtctggactggaagggaagattgaactcattgaaaacaaacaggatgtcaccaattcaggtctctggtacctatgccaatttgctgagggaattaaggatgggatcaatgataaacttattcaggacatcggtgcaaaacttcctcctgaccgttcaacgatggttctggaaggtacatcactaaagggccttcaattcattgtcgataccactaagtcaggagatgcggaaataacggaggagaacgttattgtacaaaatgataacaatggcatatccatgaaaaacaatataattacaaagaccagaatacacaggtcatatccaatcggtatatctttgacaactgacaagggatga

SEQ ID NO: 607 - protein, 319 aa, Aquilegia sp.
MAMQTGVGTSKVLVLIGAGLTGSVVLKSGQLSDLILQLQDLMNGVNDAGALSGKYDTALLAAQIRYLAQEIRELTLSRPVTIFNENSGTSGNLASYIVPAAALGAMGYCYMWWKGLSLADVMFVTKQNMANAVANVSQQLEQVSALLSSTKRHLSQRLENLDGKLEEQRETTKLVMNEVIGVKSDLFQIGYDVEIIQKMVSGLEGKIELIENKQDVTNSGLWYLCQFAEGIKDGINDKLIQDIGAKLPPDRSTMVLEGTSLKGLQFIVDTTKSGDAEITEENVIVQNDNNGISMKNNIITKTRIHRSYPIGISLTTDKG

SEQ ID NO: 608 - DNA, 963 bp, Hordeum vulgare
atggcgatggcgacgcacacgggggtcgccgcctccaaggtcctcatcctcgtcggcgcaggcctgacggggtcgatcgtgcttcggaatggccgcctgtcggatgtattggcggagctccaggagctcatgaagggcgtaaatcaaggagaaggttcgagcgcctatgacatggctcttatccaagctcagattcggcatttagcccaagaagtcagagatttaactttgtcaaagcccattaccatattgagtggcaaatcggactccggaggtggtttatcgtcctacatactgccagcagctgcagttggagcattaggttattgctatatgtggtgtaagggatggtccttctcagatgtcatgtttgtcacaaaacgcaatatggccagtgctgtcgatagcatgtcgaagcaattggagcaagtttcttcagcgctagcagcaacgaaaagacatttaacaaaacgccttgagaatttggatggcaaaatggacgagcaagtggaagtctccaaacaaatccggaatgaggtcgttgatgttaaaactgatctgtctcaaattggctttgacgttgaagcaattcaacagatggtagccggattggaagagaagatcgagctgcttgacaacaagcaggatgcggctaatgctggtatatggtacctctgccgaatggcaggaggtataaaagagggaataaatgccaagtttttccaagaagcggatgaaaaactcaagctcttggacctggctcaaactgaaaagaagccggtgaagggtctcgaattgtttctggagagcaccaaggaggtaaaggcactcgactccaagcctaagaccatcgtgcagaacgacgccaagaaaccgacgaaaacgttcgatgtgcccataaaaagtgctgcggtgcacaggtcaaacaggttcttaattcgtaaagaaggcctcgtgctgtga

SEQ ID NO: 609 - protein, 320 aa, Hordeum vulgare
MAMATHTGVAASKVLILVGAGLTGSIVLRNGRLSDVLAELQELMKGVNQGEGSSAYDMALIQAQIRHLAQEVRDLTLSKPITILSGKSDSGGGLSSYILPAAAVGALGYCYMWCKGWSFSDVMFVTKRNMASAVDSMSKQLEQVSSALAATKRHLTKRLENLDGKMDEQVEVSKQIRNEVVDVKTDLSQIGFDVEAIQQMVAGLEEKIELLDNKQDAANAGIWYLCRMAGGIKEGINAKFFQEADEKLKLLDLAQTEKKPVKGLELFLESTKEVKALDSKPKTIVQNDAKKPTKTFDVPIKSAAVHRSNRFLIRKEGLVL

SEQ ID NO: 610 - DNA, 963 bp, Populus trichocarpa
atggctttgcaggcaggggtctccacctccaaggttctcattctcgtcggtgcaggtttgactagttcgattattttgaaaaatggacggttgtctgaactcattgggcagcttcaagaattactcaagggtgttgatcaagttgagatcgccccctacaaatacgatagcgctcttcttgcagcccagattcgtcaattggcgcaagagattaaggagttgaccttatccagtcctgtaaccatctacaatggaaattctgcttctagtgggagtttttcatcttacctagtgccagctgctgctcttggagcaatgggatattgttacatgtggtggaaggactggtcattttcagatgtaatgtttgtaacaaagaaaaatatggcaaatgctgttgcaactgtgtcaaaacaaatggagaatgtatcagaaacattggcttcaaccaaaagacatctaacaaaaaggctggaaaatctggactggaagattgaggagcagatagaaacatctaagctcattgccagtgatgtagatgagatgaaatcaaacctttcccaaatcggatatgatgttgaatcaatccatcaaatgatatctggcctggaaggaaagcttgaacttctcgaaagcaaacaggataccacaaactctggtctctggcacctatgtcaatttgctggaggctttaaagatgggcttggtactcaagtttatcaggatgttggtgctaagctagcgaaccctccagcaatggcatatgaagaaaggtctctaaagggtcttcaatttattgctgaaaccaaagagtcggataaggttgagaaaccagtagaaaatgtgaagaatgatcttcatatctaccctggtgaaaaagtcaaaactgtgaagacgagagtacacaggtcatatccggtcgggttttctttgacccgagacattgtcggatccggcatatag

SEQ ID NO: 611 - protein, 320 aa, Populus trichocarpa
MALQAGVSTSKVLILVGAGLTSSIILKNGRLSELIGQLQELLKGVDQVEIAPYKYDSALLAAQIRQLAQEIKELTLSSPVTIYNGNSASSGSFSSYLVPAAALGAMGYCYMWWKDWSFSDVMFVTKKNMANAVATVSKQMENVSETLASTKRHLTKRLENLDWKIEEQIETSKLIASDVDEMKSNLSQIGYDVESIHQMISGLEGKLELLESKQDTTNSGLWHLCQFAGGFKDGLGTQVYQDVGAKLANPPAMAYEERSLKGLQFIAETKESDKVEKPVENVKNDLHIYPGEKVKTVKTRVHRSYPVGFSLTRDIVGSGI

SEQ ID NO: 612 - DNA, 963 bp, Triticum aesticum
atggcgatggcgacgcacacgggggtcgccgcctccaaggtcctcatcctcgtcggcgcaggcctgacgggatcgatcgtgcttcggaatggccgcctgtcggatgtattggcggagctccaggagctcatgaagggcgtaaatcaaggagaaggctccagcgcatatgacatggctcttatccaagctcagattcggcatttaggccaagaagtcagagatttaactttgtcaaagcccattaccatattgagtggcaaatcggactcgggaggcagtttatcgtcctacatactaccagcagctgcagttggagcattaggttattgctatatgtggtgtaagggatggtccttctcagatgtcatgtttgtcacaaaacgcaatatggccagtgctgttgatagcatgtcgaagcaattggagcaagtttcgtcagcactagcagcgacgaaaagacatctaacaaaacgccttgagaatttggatggaaaaatggacgaacaagtggaggtctccaaacaaatccggaatgaggtcacggatgttaaaactgatctgtctcaaattggctttgacgttgaagcaattcaacagatggtagctggactggaagagaagattgagttgcttgacaataaacaggatgcggctaatgctggtatatggtatctctgccgaatggcaggaggtataaaagagggaataaatgccaagtttttccaagaagcggatgaaaaactcaagctcttggacctggctcatactgaaaagaagccggtgaagggtctggagttgtttctggagagcaccaaggaagccaaggcactcgactccaagcctaagaccatcgtgcagaacgatgccaagaaaccgatgaaggcgttcgacgtgcctgtgaagagtgctgcggtgcacaggtcaaacaggttcttaattcgcaaggaaggcctcgcgctgtga

SEQ ID NO: 613 - protein, 320 aa, Triticum aesticum
MAMATHTGVAASKVLILVGAGLTGSIVLRNGRLSDVLAELQELMKGVNQGEGSSAYDMALIQAQIRHLGQEVRDLTLSKPITILSGKSDSGGSLSSYILPAAAVGALGYCYMWCKGWSFSDVMFVTKRNMASAVDSMSKQLEQVSSALAATKRHLTKRLENLDGKMDEQVEVSKQIRNEVTDVKTDLSQIGFDVEAIQQMVAGLEEKIELLDNKQDAANAGIWYLCRMAGGIKEGINAKFFQEADEKLKLLDLAHTEKKPVKGLELFLESTKEAKALDSKPKTIVQNDAKKPMKAFDVPVKSAAVHRSNRFLIRKEGLAL

SEQ ID NO: 614 - DNA, 966 bp, Solanum tuberosum
atggcgttgcaaaccggcatcgccacttccaaagtactcatactcgtcggcgcaggtttgactgggtcagtaatattgaaaagtggacgattatctgatctgatctcgcagcttcaggaggtgataaatggcgtgaatgcagctgagacatctcctggtaaatatgacactgctcttctagcagctcagattcgacaattagcacaagagatccgggagatgagcatatcaaatccaattactattttcaataaggattcttcctccagtgggagctatggttcttacattcttccagctgctgcagttggggcaatgggatattgttacatgaagtggaagggttggtcattttccgatgtaatgtatgtgacaaagcataatatggcgaatgctgttgcatctgtgtctaagcagttggagaacgtatctgatgcattggcttctacaagaagacatttgactaagaggctggaaaacttggactggaagctagatgagcaaattgagatatcaaaccttattactaatgatgtgagagatgttaaggctaatctaaatcaaattggtttcgatataaacttaatccatgagatggtgtctggattggaagggaagattgagcttcttgagagtaaccaggatgtgactaattctggtttgtggtacttgtgccaagctgctgggggcattaaggatgttcaaaatactaaggttattcagggcatcgaggctaagctgatagagcattcaaaggtgactcccaaggaaaattctgtgaaggggcttgaattcattgtcgaatctaatgattcaagtgtgccaccaaaatcggttatggatacagaaggaaaagatattattgacaattttgccaaaggtccagttgctagcaaaatgaggattcacagatcttatccagttgggttgtctttaacaaggagcgtgctgggtccaggattctga

SEQ ID NO: 615 - protein, 321 aa, Solanum tuberosum
MALQTGIATSKVLILVGAGLTGSVILKSGRLSDLISQLQEVINGVNAAETSPGKYDTALLAAQIRQLAQEIREMSISNPITIFNKDSSSSGSYGSYILPAAAVGAMGYCYMKWKGWSFSDVMYVTKHNMANAVASVSKQLENVSDALASTRRHLTKRLENLDWKLDEQIEISNLITNDVRDVKANLNQIGFDINLIHEMVSGLEGKIELLESNQDVTNSGLWYLCQAAGGIKDVQNTKVIQGIEAKLIEHSKVTPKENSVKGLEFIVESNDSSVPPKSVMDTEGKDIIDNFAKGPVASKMRIHRSYPVGLSLTRSVLGPGF

SEQ ID NO: 616 - DNA, 585 bp, Euphorbia esula
atggctctacctttcggcaagttaggcatccttattggagcaggtattcttggctcggttcttgcaaaagaggggcggttgccgagtatttctgacgtggtttcaggtgcatttaagtttggtttgaagattaaaggagatgactctgcttcatcagttagaaagccacataacgaccccttaatggctcaggttaacagccttcgggaggagctgcaaatgttagtatcaaacagaccaatgaccattataactacaagtgggcaaggtgcaaataaatatggaacaattgttgttgtgattatagttggctatggttatgtttggtggaagggttggaagctacctgacatgatgtttgcaacaagacgaagtctatctgatgcttgtacttctatagctcatcaacttgagaatgtttatggatcaatcaggaataccaggagggaattatcttcagatattagtcgtgtggactctaatttggatgagatagcttcactcactgctagcacacaagaaaaggttactgagctgttagaagatttcaggaaggattggtcacgatgttcgatatgttcgtga

SEQ ID NO: 617 - protein, 194 aa, Euphorbia esula
MALPFGKLGILIGAGILGSVLAKEGRLPSISDVVSGAFKFGLKIKGDDSASSVRKPHNDPLMAQVNSLREELQMLVSNRPMTIITTSGQGANKYGTIVVVIIVGYGYVWWKGWKLPDMMFATRRSLSDACTSIAHQLENVYGSIRNTRRELSSDISRVDSNLDEIASLTASTQEKVTELLEDFRKDWSRCSICS

SEQ ID NO: 618 - DNA, 663 bp, Lactuca sativa
atggcacttcctctggggaagctgacgttaatcattggagcaggccttgttgggtcagttcttgctaaagaaggacgcttgccaagcgtatatgatgttttctccggtgcctcaaaggtacttaaaatgattggaaacgatgataaacctacatcaaccccaaaaagacacagtgactcgttaatggcacaggtgaacagcctaaggcaggagctacaactcctggcatcaaatagacctgttaccattgtgaccaccaatggttcatcaggtgctaacaaatatggtgtcattatcattgttgttgtcgttggatacggatatgtttggtggaagggttggaagcttcctgatatgatgtttgctacaaaacgaagcttatctgatgccacaagtgctgtagctaaacagcttgacactgtctactcatcacttgcagctaccaagagacatttatctacaaggattgatcgtgtggatagcagtttagatgaggttgcagaacttacagctgctacaaaagaggaggtttctttaatacgtggggatacaaaagtgattgctctagatgttcaatctgtacataatgctgtttacaccctggagagtaagcttagtaggattgaaattgaaacaggacgacacaaacctaggagtggctaa

SEQ ID NO: 619 - protein, 220 aa, Lactuca sativa
MALPLGKLTLIIGAGLVGSVLAKEGRLPSVYDVFSGASKVLKMIGNDDKPTSTPKRHSDSLMAQVNSLRQELQLLASNRPVTIVTTNGSSGANKYGVIIIVVVVGYGYVWWKGWKLPDMMFATKRSLSDATSAVAKQLDTVYSSLAATKRHLSTRIDRVDSSLDEVAELTAATKEEVSLIRGDTKVIALDVQSVHNAVYTLESKLSRIEIETGRHKPRSG

SEQ ID NO: 620 - DNA, 801 bp, Physcomitrella patens
atggccacatctaggttgctgttggttgtgggtgctggaactgctggatcattggctttgcggaacccgaaagtcgccgagcttctgaacgatctctcccaggtcgtaaccaagcacctttccgaagaggacggatcagggggcgaaaattctgccctagctgcccaagttcagcgtctgacacaagagcttcgatatcttgcatcatcacccagaaatgttacggtggtcaacggtggttcttccaccaattactcttcactaatactacccgctgcaactataggaattgtcggttacgggtacatcaagtggaaagggctaaaatggacagacttcatgtatgtcacaaggaagcacatgactaatgccgtcgcaagcgtctcaaagcagcttgagactgtatccactgcccttcaggcaactaaacgacaattgaccgctaagctggaaggcgtgaccaagagcttggatgacagtatgatcttgcaaggcctgattagaaatcaagtgaccgaggtgcagagcgaggttgtgagagctaatggagagattggtgaagtgcagcgactcgtattgggactagaagggaaaattgacgaggtccaggctaaccaagaaattgccaatcagggcatcgtattgctttgcaggtacgcatctcaacctcctcgactttctccaaattcctgtccgatcatcattaaacagctgcttatgtatggaaggctttttctttttcaattttttactctccttcctttcttgtgtgctcattacggtggctgtgcaggtttgtag

SEQ ID NO: 621 - protein, 266 aa, Physcomitrella patens
MATSRLLLVVGAGTAGSLALRNPKVAELLNDLSQVVTKHLSEEDGSGGENSALAAQVQRLTQELRYLASSPRNVTVVNGGSSTNYSSLILPAATIGIVGYGYIKWKGLKWTDFMYVTRKHMTNAVASVSKQLETVSTALQATKRQLTAKLEGVTKSLDDSMILQGLIRNQVTEVQSEVVRANGEIGEVQRLVLGLEGKIDEVQANQEIANQGIVLLCRYASQPPRLSPNSCPIIIKQLLMYGRLFLFQFFTLLPFLCAHYGGCAGL

SEQ ID NO: 622 - DNA, 849 bp, Vitis vinifera
atggctctccctctcggaaagcttaccctcctcgtcggtgcaggtattgttgggtcagttcttgcaaaagaagggcgcatgtcggatgtctctaattttttctcaggtgctttcaagattgctttaaagcaacttaaacaagatgattcaacctcaccaactgtcaagcctaagaacgatgctttgctggctcaggttaatagcttgagacaggagttgcaaatcttggcatcaaatagatcaattacaattgtaactgcaagtggaacaggtaaaagcaaatatggtgtagtggttattattgtcgtagtaggatatggctatgcctggtggaagggctggaagcttcctgatatgatgtttgcaacgaggcgtagtttatcagatgcttgctcttcaattgctaaacagcttgagaatgtttattcatcaattgcagcaaccaagaggcatttatcttccagaattgaccgtgtcgattgtagtatagacgagtttgcagaacttacttctgctaccaaggaggaggtctttgaactacgaggtggcatgaagatgatcggtggggatgttgcatctgttcagaaagctgtccaaaatctggagagtaaaataattgaaatagaagggaagcaggatatcacaaacgaaggactagggagactctgtcattatgcctggaacttggaaaatagcagaacaacagagcggattcaggcatggactgaacttctactctttcttctgtgttttcttgtaatagttttctatttccggttttgctttttactatttgtgagacttaataatctttttgtgagaccacacgatataatttttcctgtttga

SEQ ID NO: 623 - protein, 282 aa, Vitis vinifera
MALPLGKLTLLVGAGIVGSVLAKEGRMSDVSNFFSGAFKIALKQLKQDDSTSPTVKPKNDALLAQVNSLRQELQILASNRSITIVTASGTGKSKYGVVVIIVVVGYGYAWWKGWKLPDMMFATRRSLSDACSSIAKQLENVYSSIAATKRHLSSRIDRVDCSIDEFAELTSATKEEVFELRGGMKMIGGDVASVQKAVQNLESKIIEIEGKQDITNEGLGRLCHYAWNLENSRTTERIQAWTELLLFLLCFLVIVFYFRFCFLLFVRLNNLFVRPHDIIFPV

SEQ ID NO: 624 - DNA, 873 bp, Centaurea solstitialis
atggctcttcctcttgggaagctgacgattatcattggagcaggccttgttgggtcagtgcttgctaaagaaggacgcatgcctggtgtctctgatttattttctggtgcttcgaaggtacttaaattaataagaacagatgagaaacccagttcaaatccaaaaccacacagtgattcattaatggcgcaggtcaatagcctaaggcaagagctgcaactcttggcatctaatagacccgttaccattgtgacttctggtggttcagcaggtcctggcaaatacggtatgattgtcatcgttgttgtcgtaggatatggatatgtttggtggaagggttggaaacttcctgatatgatgtttgctacaaagcgcagtttatctgatgcaacaaatgccgtagctaaacagcttgacaatgtctactcatctcttgcggctaccaagcggcatctatcttcaagaattgatcgtgtggattgtagtttagatgagtgtgcagagattgctgcttctacaaaagaggaagtctctgcattacgaggagataccaaattgattgctttggatgtacaatctgtacataatgcagtttactccctggagagtaaactgagtaggattgaagggaaacaggataatacaaatctcggagtggcaaagctgctacgtactgccttaacactcgagcaacaggcatctgcggaccgcatccagggaaacccatccagttcatcaacgccagctctcgaattgccacaaagggctttgtctttgccaccagttcaaatagaggaactacagttatctcctccagtgtctcccaagccaagcgacctctcgaaagtaccctctctgctgcatctggcttga

SEQ ID NO: 625 - protein, 290 aa, Centaurea solstitialis
MALPLGKLTIIIGAGLVGSVLAKEGRMPGVSDLFSGASKVLKLIRTDEKPSSNPKPHSDSLMAQVNSLRQELQLLASNRPVTIVTSGGSAGPGKYGMIVIVVVVGYGYVWWKGWKLPDMMFATKRSLSDATNAVAKQLDNVYSSLAATKRHLSSRIDRVDCSLDECAEIAASTKEEVSALRGDTKLIALDVQSVHNAVYSLESKLSRIEGKQDNTNLGVAKLLRTALTLEQQASADRIQGNPSSSSTPALELPQRALSLPPVQIEELQLSPPVSPKPSDLSKVPSLLHLA

SEQ ID NO: 626 - DNA, 954 bp, Selaginella moellendorffii
atggcagtgcaggccggaatggcgacatccaagctcatcattctccttggagcagggatgactggctcgattcttataaagaatgggaagctctcggatttcttcaaggatcttagcaaggttttctcgaagcacttgaaagaggatgacaaggatgaagtgacggaaacgctggcacagcaagtccagcgcttgaccaacgatctaagacagttagctggctccaggaacatcacggttgtgaatgctcctggcacctctgggcagtcaagtaatctttcctctctcgccatgcctgcgctcgtcattggtgttgctggatatggatacttttggtggaagggctggtcatggacggatgtcatgtatgtcacccgtcgaaacatgtcgaatgtggttgcgagcgtgtcaaagcaactagatcaagtctcggccgctgttacggcaacgaaacggcatctaacttcacggattgattcggtctcgaaaactctggacgacagtgttgcggttcagggattgataaagaacgaggtgtttgaaattcgtggagatgtggctcgtgttggcggggatattggagctgtacaacaaattgtcgagggcttgggcaatcagctcgacgatgtacaaaccaagcaggactttacaaaccaagggattatcttgctttgtcaatttgcaaggagatgggaagagactaggcgccaagaactgcctgggatttctcccatcttgagtttgcagaacggtgaagccaagcccgctagcggtgtcgacagcattctacaggggctacctccgctgcctaaagcacgtctagagcgatcggcatccgctactggttcaggactgaagttcatctccgatgcgctttctggaaactctggcgatagctccaagctccagaggacattgacaccgaacttgtcattcaggctgcaaaagacttga

SEQ ID NO: 627 - protein, 317 aa, Selaginella moellendorffii
MAVQAGMATSKLIILLGAGMTGSILIKNGKLSDFFKDLSKVFSKHLKEDDKDEVTETLAQQVQRLTNDLRQLAGSRNITVVNAPGTSGQSSNLSSLAMPALVIGVAGYGYFWWKGWSWTDVMYVTRRNMSNVVASVSKQLDQVSAAVTATKRHLTSRIDSVSKTLDDSVAVQGLIKNEVFEIRGDVARVGGDIGAVQQIVEGLGNQLDDVQTKQDFTNQGIILLCQFARRWEETRRQELPGISPILSLQNGEAKPASGVDSILQGLPPLPKARLERSASATGSGLKFISDALSGNSGDSSKLQRTLTPNLSFRLQKT

SEQ ID NO: 628 - DNA, 1032 bp, Arabidopsis thaliana
atggctattcctctcgggaagctcaccatcctcatcggtgcaggtcttgttgggtcagtacttgctaaagaagggagtttaccagatgtctcgagttttgtctccggtgctcttaagatggtatttaggcagctgaagcaagaagaacctgccaaatcagccagcaagccccgcaatgatacactaatggcccaggttaacagtcttaggcatgaattgagcttgctttcttcaaacagacctatcactattgttaccacagcaggatcaggtggtaaaaagtatggttacatcattataattggggtgataggctacggatatgtatggtggaagggctggaaacttccggatcttatgtttgcaacaaggcgcagcttatcagatgcatgtaatagtgttggcagccagatcgatggtttttacacatcactctcgggtaccaaaaaagagttaagttcaaaaattgacgggatgggtcgtagtttggatgctaatacagaaattattcaagatacaggacgagaggtgatggaactacaaagaggtacggaaaatattaaggatgacgttaagtttgttttcgatgctgttgaaaatctggcaagcaaagtctatcgtattgagggaaatcaggatattacacttaaaggagtcggggcgctgcatgctcaggttcgggagaacaaaagaattcaagagtccaataaggctttaccatcaacttcagcagtgccagcccttgaggcagctcctatgacaccatcgtcaaggactttgtctttgcctcctgcttctccccgtgaatctcagtcgccttcaacttctaatggagctcaacagtcacgtggtccacttcagcacactcaatctatgtctggtttgaaggagataagcgaaaatggaacacattctggagaaactacgggaaacacgagttctggcctgtttagtattttctcaataccaagaatagggaggactcgaagtgtggtcaacacagtgcctactaactccattggaccccaatag

SEQ ID NO: 629 - protein, 343 aa, Arabidopsis thaliana
MAIPLGKLTILIGAGLVGSVLAKEGSLPDVSSFVSGALKMVFRQLKQEEPAKSASKPRNDTLMAQVNSLRHELSLLSSNRPITIVTTAGSGGKKYGYIIIIGVIGYGYVWWKGWKLPDLMFATRRSLSDACNSVGSQIDGFYTSLSGTKKELSSKIDGMGRSLDANTEIIQDTGREVMELQRGTENIKDDVKFVFDAVENLASKVYRIEGNQDITLKGVGALHAQVRENKRIQESNKALPSTSAVPALEAAPMTPSSRTLSLPPASPRESQSPSTSNGAQQSRGPLQHTQSMSGLKEISENGTHSGETTGNTSSGLFSIFSIPRIGRTRSVVNTVPTNSIGPQ

SEQ ID NO: 630 - DNA, 1032 bp, Gossypium hirsutum
atggctcttcctcttggcaagttatctatcatcgttggtgcaggtattgttggttcaattcttgcgaaagaaggacgcatgtcaggtgtttctgattttgtctctggtgctttcaagattgcttttcggcaacttaagcatgatgattccactccgtcaaacaagccgcgaaatgactatttggtggctcaggttaacagcctaaggcaggaactgcaaatcttggcatcaaatagaccaattacaattgttaccggacaaggaacaggtactagtaaatacagcataatcattgttgttgtcgttgttggatatggctacgtttggtggaagggctggagacttcccaatatgatgtttgcaacgaggcgtagtttatctgatgcacgtgatgccatagctaagcagcttgagagtgtttactcgtcaatctcggctaccaaacggcaactatcctcaagaattgagggtgtggataatcgtctacatgaaattgcagatattactgctacaacacatgaagaggttactctactacaagatcaatcaaagaagctcaacactaatgttcaatccgttcgatatgtagttcaaactctggaaagtaagataaaaaggatagaagggaagcaggatatgacaaatgaaggagtcaactggttgtgtgattatgcccagaccatacaacaaaatagacccactgatcatactcaggctttaccagctaactcttccaggccagctcttgaagccccaacgaaaacaccatcaaggagtgggtctttgcctcccattttaccggtagaaccgccgtctccatcttctggttcttctaatggaactcccaaggttcggagatctcctaaacatgtaatctctgcctcaggccttaaggaattaggtgaatcaagtgccaataatgttggcaacaacgggacagtgttttctggtctgagtggtttgttttctgttctgacaaggactcgcagcgcaacaaatgcaccaatgggaggatcgagtggacaacaatag

SEQ ID NO: 631 - protein, 343 aa, Gossypium hirsutum
MALPLGKLSIIVGAGIVGSILAKEGRMSGVSDFVSGAFKIAFRQLKHDDSTPSNKPRNDYLVAQVNSLRQELQILASNRPITIVTGQGTGTSKYSIIIVVVVVGYGYVWWKGWRLPNMMFATRRSLSDARDAIAKQLESVYSSISATKRQLSSRIEGVDNRLHEIADITATTHEEVTLLQDQSKKLNTNVQSVRYVVQTLESKIKRIEGKQDMTNEGVNWLCDYAQTIQQNRPTDHTQALPANSSRPALEAPTKTPSRSGSLPPILPVEPPSPSSGSSNGTPKVRRSPKHVISASGLKELGESSANNVGNNGTVFSGLSGLFSVLTRTRSATNAPMGGSSGQQ

SEQ ID NO: 632 - DNA, 1047 bp, Arabidopsis thaliana
atggctcttccgctcgggaagctcaccatcctcatcggtgcaggtcttattggatcagcattttctaaagaagggggcttaccagatgtctccaatttggtttctggtgcttttaagatggtattcaggcaactgaaacaagacgaacctagcaaatcagctagcaaaccccacgatgatgtacttgtggcccaggttaacagtcttaggcatgagatacagttgctggggtcaaacagacctatcaccattgtttcaccttcaggatcaggtggtagaaactatggtttgatcattatcgttggggtgataggctacggatatgtgtggtggaagggctggaaacttccagattttatgtttgcaacaaggcgtagcttatcagatgcatgtaataatgttggcaaccagatcgatggtttttactcatcactcaagggtacaaaacgagagttaagttcagaaattgatatgatgggtcgtcgtttggatgcaaatacagaagtaattcaagaaacaatacaagaggtggctaagctacaggatggtacatcatttataaaggatgacgttaaggctgttttcgatgcttttgaaaatctggcaagcaaagtgtgtcgtatagagggaaatcaggatatcacacttagaggagttggggctctgcatgctcagtgtcaggagaaccaaagaattcaagagtccaataaggctttgccatcaacttcatcactgccagcccttgaggcagctcctatggcaccctcttcaaagactctgtctttacctcctgcttctcccgatgaatcccagtccccgtcaacccctaatgtagctcaaaagtcacggggcctacttcagcacactcaatctatgtctggtttgaaggacataaatgaaagctctagtagccacaacacgtcttcaaatggaatatattttgggggaaacggtgcatcaggatcgagttcgggcgtgcttggtaggttctcaatagcaagaataatgaggactcgtactgtggtcaacacagtgtctactaactga

SEQ ID NO: 633 - protein, 348 aa, Arabidopsis thaliana
MALPLGKLTILIGAGLIGSAFSKEGGLPDVSNLVSGAFKMVFRQLKQDEPSKSASKPHDDVLVAQVNSLRHEIQLLGSNRPITIVSPSGSGGRNYGLIIIVGVIGYGYVWWKGWKLPDFMFATRRSLSDACNNVGNQIDGFYSSLKGTKRELSSEIDMMGRRLDANTEVIQETIQEVAKLQDGTSFIKDDVKAVFDAFENLASKVCRIEGNQDITLRGVGALHAQCQENQRIQESNKALPSTSSLPALEAAPMAPSSKTLSLPPASPDESQSPSTPNVAQKSRGLLQHTQSMSGLKDINESSSSHNTSSNGIYFGGNGASGSSSGVLGRFSIARIMRTRTVVNTVSTN

SEQ ID NO: 634 - DNA, 1056 bp, Glycine max
atggctctttcactcggcaagctcgtcattctcgtcagcgcaggaattgctggttcagtaattgcaaaagaagggcgtctgccagatgtctctggtctcgcctctggtgcttttaaggttgttttgaggcaacttaaaagcgatgatcctgctccaactgttaaaaagcagccgcataatgatgctttgttggctcaggtaaacagtcttcggcaggaactgcaacttcttgctagagatagatcgatcactattgtaaatgcaagtggaacaggtggaagaaaatatataacagtgattgttattgttgtggtaggatatggatacgtttggtggaagggatggaagcttcctgatctgatgtttgcaacaaggcgtggtttgtctgatgcttgcacatctattggtaatcagatgggaaagctttatgaatcaattggggataccaaaaagaaattatctgcaagaatcaacggtctggataaaaatttagaagaatgtgctgccattactgaaagtaccagggaggatatatctgtaattcaacgtaaagcagatacgataagtgaagattcaaagtcttttcatgtcgcagtccatgttctggaatctaaaattaaagaaatagaagagaagcaggtggccacaattgaaggagtgaacatgttgtgtcaatttaccaagactttggagaatagcagatccacagagtatattcaggcatcttcatccagttcttccaggccagcccttgagccaccaccagtttcaccctcttccagttccagggggtcacagtcaggttccgctaggctatctcttgagccaccatcccttacaccatcatcaaggactgcatccttgccaccgacattgccaactgatccaccatctccatcgaattctggtggatctttccaggggccaaaagtagacaaaagcaatggatctagttctggcttgtttgggttgatatctggtgtctatggtccattgctgacaagaactcgcagtgcgacagatgcagtagtccaaaaaactcgttcggctagttaa

SEQ ID NO: 635 - protein, 351 aa, Glycine max
MALSLGKLVILVSAGIAGSVIAKEGRLPDVSGLASGAFKVVLRQLKSDDPAPTVKKQPHNDALLAQVNSLRQELQLLARDRSITIVNASGTGGRKYITVIVIVVVGYGYVWWKGWKLPDLMFATRRGLSDACTSIGNQMGKLYESIGDTKKKLSARINGLDKNLEECAAITESTREDISVIQRKADTISEDSKSFHVAVHVLESKIKEIEEKQVATIEGVNMLCQFTKTLENSRSTEYIQASSSSSSRPALEPPPVSPSSSSRGSQSGSARLSLEPPSLTPSSRTASLPPTLPTDPPSPSNSGGSFQGPKVDKSNGSSSGLFGLISGVYGPLLTRTRSATDAVVQKTRSAS

SEQ ID NO: 636 - DNA, 1062 bp, Sorghum bicolor
atggtgcttggcaaggtcgccatcgtcatcggctcaggaatcgtcggatcagtactcacaggcggtgagtctggccttcccgacttcagggatgcaatctctggtgctttcaagttcttgaccaagggtgcaaagcaaggcaaggatgggccatcgaccagcagtccacatactgctcagttgttgacccaggtcaatcatctcagagaggagcttcagatgttgtctaaatcaaatcatgttgctattgtcactgttgatggtagacctggccctggtgcatatggtataacagctgttgttattggagctattggctatttattcataagatggaaggggtggaaactttctgatatgatgtttgtgacaaagcgtgggttatcagatgcttgcaatgtagtggggaaacaagtggatcaggtttcagaaagtgttaatgttgcaaagagacatcttgccggaaggattgatcgtgtagattgtagtttagatgaatgccgagaaattacagaagccacaagggaagaggttacaatcatccatggagatctaagtgccttccagaaggaaatggaaacagttcatcttgtagttcgtagtttggagacaaagcttgggcgcctagcttatactcaagaccggacaacacgaggaatatatgacttgtgtgagttcactaaaaaattggatcagagcccgaaagctgatattcgccaggttacatcatcaactcctcgtcctgctattgaatcctcagagagaattgttagggctgcttctttgcccccggctatggaaacagagtctcctagaatagaggcatctaaggttgtgcgctcatctacaatcatgtcagcatcaggacttagtttgctagctggaactacaataccacctaaaagagatcaaccgggtgctttcagcagagcaagttcaatgaaggaaggaccctctgaattatcgagtggtgtgcaaaattcagcagaaccaagccccaggagatctggcgcttcaaccctgtttggagggcttgggtttctaaggagctacaccagctga

SEQ ID NO: 637 - protein, 353 aa, Sorghum bicolor
MVLGKVAIVIGSGIVGSVLTGGESGLPDFRDAISGAFKFLTKGAKQGKDGPSTSSPHTAQLLTQVNHLREELQMLSKSNHVAIVTVDGRPGPGAYGITAVVIGAIGYLFIRWKGWKLSDMMFVTKRGLSDACNVVGKQVDQVSESVNVAKRHLAGRIDRVDCSLDECREITEATREEVTIIHGDLSAFQKEMETVHLVVRSLETKLGRLAYTQDRTTRGIYDLCEFTKKLDQSPKADIRQVTSSTPRPAIESSERIVRAASLPPAMETESPRIEASKVVRSSTIMSASGLSLLAGTTIPPKRDQPGAFSRASSMKEGPSELSSGVQNSAEPSPRRSGASTLFGGLGFLRSYTS

SEQ ID NO: 638 - DNA, 1071 bp, Oryza sativa
atgttcacatgttcttttctttttctttccttattattatttgtcatggtcttggctgggatactatgcactgctgattatcattatgttgttcactgcattataaaggttcttggacatgtgaaagtttttatagttattgctaataaactttcatcatgctcttttgcctttaaacatacacaattacatatggttacacacattctttctcaaatttccttaaacgacattcatgtaaatcctttttctgtaggacctggtacatttactataacagtggtggctgttgctggggctgttggctacgcctacattaagtggaagggctggaaactttctgatttgatgtttgtcacgaagcgtggcttatccgatgcttgcaatgtagttggcagccaattggacaaggtttcagatgatgtcacttctgcaaggaaacatctcgctggaaggattgatcgtgtggatatcagtttagatgaaacacaagaaattattgaagggacaagggatgaggtcacagtcatccatggggatcttagtgctttccaagaggatttacaatcagttaaccttgtagttcggagtctggaatcaaagctcgtgagtctggaatacacccaggatcgtacggctaatggaatatctgacttggttgagttcacccagaaagccactattcgtcaggtcccagcagcatccgttcctccagctattggatcttcagagctagttgttaggagggtttcttcgttgcctcaatctactgctcttccagttctgccgacaaccacacctgcagctgaaccatcacctagggcagaggcaccacaggaggaacagtggggttttgtgagcagaacatcatcttgtagggaaggatcaggtcgttttcaggagcagcggagtgttgtgaccagaacgtcgtctattagggaaggatctcctgaatcttcaaatggagcctcatcctcaactggagcaagcacaggaacgaacacaagcacgagcagatttggtgggctgaggctgcctggacttgggtttcttgcaagttcgacgagatag

SEQ ID NO: 639 - protein, 356 aa, Oryza sativa
MFTCSFLFLSLLLFVMVLAGILCTADYHYVVHCIIKVLGHVKVFIVIANKLSSCSFAFKHTQLHMVTHILSQISLNDIHVNPFSVGPGTFTITVVAVAGAVGYAYIKWKGWKLSDLMFVTKRGLSDACNVVGSQLDKVSDDVTSARKHLAGRIDRVDISLDETQEIIEGTRDEVTVIHGDLSAFQEDLQSVNLVVRSLESKLVSLEYTQDRTANGISDLVEFTQKATIRQVPAASVPPAIGSSELVVRRVSSLPQSTALPVLPTTTPAAEPSPRAEAPQEEQWGFVSRTSSCREGSGRFQEQRSVVTRTSSIREGSPESSNGASSSTGASTGTNTSTSRFGGLRLPGLGFLASSTR

SEQ ID NO: 640 - DNA, 1074 bp, Aquilegia sp.
atggctcttgcccttgggaaggtcaccatccttatcggtgcagggcttcttgggtctgtgctcgcaagggagggaggcatgacaagtgcctcaaacttcatttctggcgctatcaagtttgtgaagcttgttaaacaagatgactcgtctccgtcagttagtaaaccacgaaatgactctctaatcgcgcaggtaaaagacctacaaaagcagctgaaagacttggtggacaataggccagttataattcggactgggggaagctcaggtgttaaatcctatggagtccctgttttcagtgtggttgttgtgggaacagcttatatgtggtggaagggttggaagctttctgacttgatgtttgcaaccaggcgtggtttagcagatgcttgctcatctgtaggcaaacaattagaccaagtgtcctcatctgtgaaggctacaaggcagtttctgtcatcaagaattgaccgtgttgatgtgactcttgatgaatgtgcagagcttacagctggcacgaaagatgaggttttccaactgcgtggagatatgaaggtgttttcggtggatgtagaatctgttcatcgtgcagtccaaactctggaaacaaaaattggtagaatagaagagaagcaggacatcacaactcatggagttcgtgttttgtgtgattttgtccataccgttgaaatgggcaggaccggagcgtctattcaggcatcaccgtccagtttctcgaggcctgcactaatgacaaccgcttcaagatctaactccttaccgcccaaagttctgtctctggaatcgccatctccatcttcaactgatgaagttcccaaggtaaagctcccattgcaaagtactgtctcagcatcaggcttgaaggaatttgagggactgtcaggtgccaccatgactgtagccaagtctgaggtcccaaatgatagttcgtctgcggatccaaagagcaatggcacttcgagttcgagtcgttttggatggaagctccccagtctaaatgcatctttcctttccagaaccaatagtgcaactttgtccttcaataatatatag

SEQ ID NO: 641 - protein, 357 aa, Aquilegia sp.
MALALGKVTILIGAGLLGSVLAREGGMTSASNFISGAIKFVKLVKQDDSSPSVSKPRNDSLIAQVKDLQKQLKDLVDNRPVIIRTGGSSGVKSYGVPVFSVVVVGTAYMWWKGWKLSDLMFATRRGLADACSSVGKQLDQVSSSVKATRQFLSSRIDRVDVTLDECAELTAGTKDEVFQLRGDMKVFSVDVESVHRAVQTLETKIGRIEEKQDITTHGVRVLCDFVHTVEMGRTGASIQASPSSFSRPALMTTASRSNSLPPKVLSLESPSPSSTDEVPKVKLPLQSTVSASGLKEFEGLSGATMTVAKSEVPNDSSSADPKSNGTSSSSRFGWKLPSLNASFLSRTNSATLSFNNI

SEQ ID NO: 642 - DNA, 1080 bp, Solanum tuberosum
atggctctacctctcggcaagctcactatcctcgttggtgctggcattgttgggtcagtacttgctaaggaaggacgattgccagatgtctctgattttttctccggcgcatttaagattgccttgaggcaaattcgacaagataaatcaaccagttcaactccaaagccacgcaatgattccttgctgcagcaggttaatagcttacggcaggagctgcaactcttggcttcaaatagatctgttacaattgtgacatcaagtggatcaggttctagcagatatactataatcattgttgttgtggtgatggggtatggctatatttggtggaagggttggaagcttcctgaatttatgtttgcaaccaggcggagcttatctgatgcatgtggtagtgtgtccaaacagcttgagagtgtatacacatctatttctgccacaaagcgccatttagcttcacgaattgatcgcgtggatactaaaattgatgattgtgtggataatactgctgcaacgagagacgaggtttctgaaattcgaggaaaagtgagaacatttggtgaggatgtccagtcagttcatcttgttgtccaatcattggagacaaaaatttgtagaattgaagggagacagaatgaaacaaactatggtgtgggaaagttgctttcttttgcgaggagcattgaaactagtagacccaaggaacagattgaggcacctccatctagctcatctagacctgcccttgaattaccatcagtagcttcctcagcacgggctgggtctttgcctccaagtttatcagtcgaatcaccatctccatctgcttctagtgtatctccgaagcgtcctttgcatggtgctgtatctgcctcaggccttaaggagcttggaggtatatcagatgtagtccaagtgtcaagtgaaagcagccctcaggtttccaatgctgttttcacctcagaacagaggagcaatgagaactctggttttggtagcgtgtttgggcgtaattttgcaggcagtggtgcttcttttctcacaagaagccgcagtgctatgcagagttttaagtga

SEQ ID NO: 643 - protein, 359 aa, Solanum tuberosum
MALPLGKLTILVGAGIVGSVLAKEGRLPDVSDFFSGAFKIALRQIRQDKSTSSTPKPRNDSLLQQVNSLRQELQLLASNRSVTIVTSSGSGSSRYTIIIVVVVMGYGYIWWKGWKLPEFMFATRRSLSDACGSVSKQLESVYTSISATKRHLASRIDRVDTKIDDCVDNTAATRDEVSEIRGKVRTFGEDVQSVHLVVQSLETKICRIEGRQNETNYGVGKLLSFARSIETSRPKEQIEAPPSSSSRPALELPSVASSARAGSLPPSLSVESPSPSASSVSPKRPLHGAVSASGLKELGGISDVVQVSSESSPQVSNAVFTSEQRSNENSGFGSVFGRNFAGSGASFLTRSRSAMQSFK

SEQ ID NO: 644 - DNA, 1092 bp, Populus trichocarpa
atggctcttcctctcggcaagttaactattctcgtcggtgcaggtattcttggctcagttcttgcaaaagaggggcggctgcctgatgtttctaatttcgtttcaggtgctttcaagattgctttcaggcaacttaaacaggatgattctacttcatcagttagcaagtctagcaaacctccaaacgactctttgatggctcaggttaacagccttcgacaggagctgcaaatgttggcatcaagtagaccagtcacaattgtaactgcaaatgggacaggttctaataaatatggtgtagttattgtggtggtagttgttggatatggctatgtttggtggaagggttggaaacttcctgatatgatgtttgcaaccaggcgtagtttatctgatgcttgcacttctatagcccagcaactagagaatgtttatgcatcaatccggagtaccaggaggcatttatcttcaaagatcgatggcgtggactcaaatttgaatgctgttgcagaactgacagccagcactcaagaaaaggttattgaattgcgagaagattcaagtaggattggcaatgatgttcgatatgttcgtgatgccgttgaaactctggaactaaaaattagcagaattgaagggaaacaggatttgacgacccaaggagtaaagaggttgtgtgactatgcctccagtttggaaaacaacttacttgaagagaatatccaggcatacttcagcatccagttcacggctgacattctcatcaaagttttcactagtttttgtgttgttatttaccaggctggggcattgcctgctccatcaagtgaaccatcaactcctgcttcgattggatctcaagaggttcaaaggccccctcgtaatgctgcatcaccctcaagccagcagagaagtaacgggatttcaggagtggctgagcttgctagcggcctcgggatttctaaaggtatccttacagaagaagaaacaagtaatggaacgagctggtttaaacctgcatttcttatgagaacgcgaagcgcaacaaacagtgtagtgcaacaaacaagttcaagcagacagcaatcgtga

SEQ ID NO: 645 - protein, 363 aa, Populus trichocarpa
MALPLGKLTILVGAGILGSVLAKEGRLPDVSNFVSGAFKIAFRQLKQDDSTSSVSKSSKPPNDSLMAQVNSLRQELQMLASSRPVTIVTANGTGSNKYGVVIVVVVVGYGYVWWKGWKLPDMMFATRRSLSDACTSIAQQLENVYASIRSTRRHLSSKIDGVDSNLNAVAELTASTQEKVIELREDSSRIGNDVRYVRDAVETLELKISRIEGKQDLTTQGVKRLCDYASSLENNLLEENIQAYFSIQFTADILIKVFTSFCVVIYQAGALPAPSSEPSTPASIGSQEVQRPPRNAASPSSQQRSNGISGVAELASGLGISKGILTEEETSNGTSWFKPAFLMRTRSATNSVVQQTSSSRQQS

SEQ ID NO: 646 - DNA, 1095 bp, Triphysaria sp.
atggcgcttcctctaggcaagctcaccatcatcgtcggtgccggccttgtgggatcggttcttgctaaagaaggcaggatatctgatgtttctgattttttctctggtgcatttaagattgttttcaagcagcttagacaagatggttctactgctccgagttccaaaccaaaaaatgactccttgatgcaacaggttagtagccttcgtgaggaattgcagctcttggcatctcatagatctgttacgattgtcactgggggcagatcaggatctaacaagtatggtgtggctgttattgttgtagttgttggatatggctatgtttggtggaagggttggaagctttcagaaatgatgtttgcgacgaggcgtggcttaaacgatgcatgttcttctgtagctaaacagcttgagactgtttactcctcaatttcggccaccaggaggcatttgtcctcgaggattgacagtgtagactgtaaaattgatgagtgtgctgataatacatctgcaacaaaagaggaggtctctgaacttcgaggtgatgagagactgataggtacagatgtccaatctgttcaccatgttgtgcgatctctggaaactaagattagcaggatagaaggaaggcagaatgaaatgaactttggagtgggtaagttggttcatttcgtgaagaatcttgagaacggaagtttggagcagattgagggggctgcatcgagttcatccactcctgctcttgaattgccacaagtatctccatcaaggactgtctctctgccgaccaacgctttacctgagtcaccttcaccctctaatgctgttggatctcgaagcagacaggctttgtgtccgccttccaattcttcacagaatatatcttctgcatcaggcctcaaggagcttcatggaatagctaatgatatcggatcaccaagcctaagtcgcactccagttgctaacgcaactcatgcaaccgaagaaacaaagcctgagagttcgtctacgggtttatttgggaggacattatccggcatcagtgcatctttgcttacaagaagccgcagtgcgatgcagtcattcaagtag

SEQ ID NO: 647 - protein, 364 aa, Triphysaria sp.
MALPLGKLTIIVGAGLVGSVLAKEGRISDVSDFFSGAFKIVFKQLRQDGSTAPSSKPKNDSLMQQVSSLREELQLLASHRSVTIVTGGRSGSNKYGVAVIVVVVGYGYVWWKGWKLSEMMFATRRGLNDACSSVAKQLETVYSSISATRRHLSSRIDSVDCKIDECADNTSATKEEVSELRGDERLIGTDVQSVHHVVRSLETKISRIEGRQNEMNFGVGKLVHFVKNLENGSLEQIEGAASSSSTPALELPQVSPSRTVSLPTNALPESPSPSNAVGSRSRQALCPPSNSSQNISSASGLKELHGIANDIGSPSLSRTPVANATHATEETKPESSSTGLFGRTLSGISASLLTRSRSAMQSFK

SEQ ID NO: 648 - protein, 43 aa, Artificial sequence
  motif 31
  VARIANT (2)..(2): / replace = "Leu"
  VARIANT (3)..(3): / replace = "Lys"
  VARIANT (4)..(4): / replace = "Leu"
  VARIANT (7)..(7): / replace = "Val"
  VARIANT (9)..(9): / replace = "Phe"
  VARIANT (10)..(10): / replace = "Ala"
  VARIANT (12)..(12): / replace = "Arg"
  VARIANT (14)..(14): / replace = "Ser"
  VARIANT (15)..(15): / replace = "Leu"
  VARIANT (16)..(16): / replace = "Ser"
  VARIANT (17)..(17): / replace = "Asp"
  VARIANT (20)..(20): / replace = "Ala"
  VARIANT (21)..(21): / replace = "Asn"
  VARIANT (22)..(22): / replace = "Leu"
  VARIANT (23)..(23): / replace = "Ser"
  VARIANT (25)..(25): / replace = "His"
  VARIANT (27)..(27): / replace = "His"
  VARIANT (28)..(28): / replace = "Asn"
  VARIANT (31)..(31): / replace = "Ser" / replace = "Asp"
  VARIANT (32)..(32): / replace = "Ser"
  VARIANT (36)..(36): / replace = "Ala"
  VARIANT (38)..(38): / replace = "Lys"
  VARIANT (41)..(41): / replace = "Ser"
GWSFSDLMYVTKRNMANAVSSVTKQLEQVSEALAATKRHLTQR

SEQ ID NO: 649 - protein, 15 aa, Artificial sequence
  motif 32
  VARIANT (3)..(3): / replace = "Thr"
  VARIANT (4)..(4): / replace = "Leu"
  VARIANT (6)..(6): / replace = "Val"
  VARIANT (7)..(7): / replace = "Leu" / replace = "Met"
  VARIANT (10)..(10): / replace = "Cys
AAAVGAVGYGYMWWK

SEQ ID NO: 650 - protein, 15 aa, Artificial sequence
  motif 33
  VARIANT (4)..(4): / replace = "Tyr"
  VARIANT (7)..(7): / replace = "Thr"
  VARIANT (8)..(8): / replace = "Val"
  VARIANT (9)..(9): / replace = "Val"
  VARIANT (10)..(10): / replace = "Ala"
  VARIANT (11)..(11): / replace = "Arg"
  VARIANT (12)..(12): / replace = "Glu"
  VARIANT (14)..(14): / replace = "Arg"
GAGLTGSILLKNGKL

SEQ ID NO: 651 - protein, 43 aa, Artificial sequence
  motif 34
  VARIANT (2)..(2): / replace = "Ile"
  VARIANT (3)..(3): / replace = "Lys"
  VARIANT (5)..(5): / replace = "Ala"
  VARIANT (14)..(14): / replace = "Ser"
  VARIANT (17)..(17): / replace = "Tyr"
  VARIANT (20)..(20): / replace = "Ala"
  VARIANT (21)..(21): / replace = "Ser"
  VARIANT (22)..(22): / replace = "Met"
  VARIANT (25)..(25): / replace = "Asn"
  VARIANT (27)..(27): / replace = "Asp"
  VARIANT (30)..(30): / replace = "Gln"
  VARIANT (31)..(31): / replace = "Asp"
  VARIANT (32)..(32): / replace = "Ser"
  VARIANT (34)..(34): / replace = "Ser"
  VARIANT (36)..(36): / replace = "Thr"
  VARIANT (38)..(38): / replace = "Arg"
GLSFSDLMYVTKRNMANAVSNLTKHLEQVSEALAAAKKHLTQR

SEQ ID NO: 652 - protein, 29 aa, Artificial sequence
  motif 35
  VARIANT (1)..(1): / replace = "Gly"
  VARIANT (2)..(2): / replace = "Ser"
  VARIANT (3)..(3): / replace = "Ser"
  VARIANT (4)..(4): / replace = "Gln"
  VARIANT (5)..(5): / replace = "Gln"
  VARIANT (7)..(7): / replace = "Gly"
  VARIANT (9)..(9): / replace = "Ser"
  VARIANT (10)..(10): / replace = "Gly"
  VARIANT (12)..(12): / replace = "Val"
  VARIANT (13)..(13): / replace = "Met"
  VARIANT (17)..(17): / replace = "Ala"
  VARIANT (18)..(18): / replace = "Val"
  VARIANT (21)..(21): / replace = "Val"
NGGSGGNLTSLIVPAATLGALGYGYMWWK

SEQ ID NO: 653 - protein, 29 aa, Artificial sequence
  motif 36
  VARIANT (1)..(1): / replace = "Ala"
  VARIANT (5)..(5): / replace = "Ser"
  VARIANT (7)..(7): / replace = "Ile" / replace = "Val"
  VARIANT (9)..(9): / replace = "Phe" / replace = "Val"
  VARIANT (10)..(10): / replace = "Thr"
  VARIANT (11)..(11): / replace = "Arg"
  VARIANT (12)..(12): / replace = "Val"
  VARIANT (13)..(13): / replace = "Val"
  VARIANT (16)..(16): / replace = "Val"
  VARIANT (24)..(24): / replace = "Val"
  VARIANT (25)..(25): / replace = "Met" / replace = "Val"
MAMQAGMGLSKILILAGAGYTGTILLKNG

SEQ ID NO: 654 - protein, 50 aa, Artificial sequence
  motif 37
  VARIANT (3)..(3): / replace = "Met"
  VARIANT (11)..(11): / replace = "Val"
  VARIANT (22)..(22): / replace = "Ser"
  VARIANT (33)..(33): / replace = "Ser"
  VARIANT (36)..(36): / replace = "Ser"
  VARIANT (39)..(39): / replace = "Ala" / replace = "Glu"
  VARIANT (44)..(44): / replace = "Asn"
  VARIANT (46)..(46): / replace = "Asp"
  VARIANT (47)..(47): / replace = "Ser"
LIVPAATLGALGYGYMWWKGLKFSDLMYVTKRNMATAVSNLTKHLEQVSE

SEQ ID NO: 655 - protein, 50 aa, Artificial sequence
  motif 38
  VARIANT (5)..(5): / replace = "Ser"
  VARIANT (7)..(7): / replace = "Val"
  VARIANT (8)..(8): / replace = "Ser"
  VARIANT (9)..(9): / replace = "Val" / replace = "Phe"
  VARIANT (11)..(11): / replace = "Arg"
  VARIANT (22)..(22): / replace = "Ser"
  VARIANT (25)..(25): / replace = "Met"
  VARIANT (33)..(33): / replace = "Glu"
  VARIANT (34)..(34): / replace = "Ile"
  VARIANT (35)..(35): / replace = "Ile"
  VARIANT (42)..(42): / replace = "Leu"
  VARIANT (43)..(43): / replace = "Asn"
  VARIANT (45)..(45): / replace = "Leu"
  VARIANT (46)..(46): / replace = "Gly"
  VARIANT (47)..(47): / replace = "Glu"
  VARIANT (50)..(50): / replace = "Asp"
MAMQAGIGLSKILILAGAGYTGTILLKNGKLSDLLGELQSLVKGMEKSGE

SEQ ID NO: 656 - protein, 41 aa, Artificial sequence
  motif 39
  VARIANT (2)..(2): / replace = "Ile"
  VARIANT (3)..(3): / replace = "Ser"
  VARIANT (4)..(4): / replace = "Thr"
  VARIANT (7)..(7): / replace = "Thr"
  VARIANT (15)..(15): / replace = "His"
  VARIANT (16)..(16): / replace = "Val"
  VARIANT (20)..(20): / replace = "Val"
  VARIANT (22)..(22): / replace = "Glu" / replace = "Ser"
  VARIANT (24)..(24): / replace = "Asn"
  VARIANT (25)..(25): / replace = "Asp"
  VARIANT (26)..(26): / replace = "Leu"
  VARIANT (29)..(29): / replace = "Ala"
  VARIANT (31)..(31): / replace = "Lys"
  VARIANT (32)..(32): / replace = "Glu"
  VARIANT (33)..(33): / replace = "Asn"
  VARIANT (37)..(37): / replace = "Val"
  VARIANT (38)..(38): / replace = "Ser"
  VARIANT (40)..(40): / replace = "Asp"
ALAAAKKHLTQRIQNLDDKMEKQKEISKSIQNDVNAAQENL

SEQ ID NO: 657 - DNA, 54 bp, Artificial sequence
  primer 1
ggggacaagtttgtacaaaaaagcaggcttaaacaatggctatgcaagcaggag

SEQ ID NO: 658 - DNA, 50 bp, Artificial sequence
  primer 2
ggggaccactttgtacaagaaagctgggtgctaggtgtcgtgtcaaggat

SEQ ID NO: 659 - DNA, 2194 bp, Oryza sativa; identical to SEQ ID NO: 289

SEQ ID NO: 660 - DNA, 4440 bp, Arabidopsis thaliana
atgggagtacaaggtctttgggagcttcttgctcctgttggtcgccgtgtctccgtagaaaccctagccaacaaacgattagccatcgatgcgagtatatggatggtacaatttatcaaagcgatgcgtgacgagaagggagatatggttcagaatgcacacttgatcgggttttttcgaaggatttgtaagcttttgtttctaaggactaaaccgatcttcgtctttgatggagctactccggcattgaaacgtcgtactgttattgctcgccgtcgtcaacgtgagaacgctcagactaaaatccggaagactgctgagaaattgctgcttaataggcttaaggatattaggcttaaggaacaagctaaagatattaagaatcagagattgaagcaggatgatagtgatagagtgaagaaacgtgtgtcttctgattctgtggaagataatttgcgagttcctgtggaggaagatgatgtaggggcgagtttttttcaggaggagaagctagatgaagtatctcaagcatctttggtgggagagactggtgttgatgatgttgtcaaagagtccgtgaaggatgatcccaagggaaagggagttttgttggatggggatgacctagataatcttgtacaggattcctcagtacaggggaaggattatcaggaaaagttggatgagatgttggcggcatcccttgcagctgaagaagaacgaaactttactagcaaagcatcgacttcagctgcagcaatcccgtcagaggaggatgaggaagaagacagcgacggagatgaggaaattttattgccagtaatggatgggaatatcgacccagctgttctggcttctctccctccatccatgcaacttgatctccttgctcagatgagagaaaaattgatggcagaaaaccggcaaaagtaccaaaaggtcaagaaggcccctgaaaagttttctgaattgcaaatagaagcatatcttaaaactgtagccttccgtcgcgaaataaatgaagttcagagatctgctggtggaagggctgttggtggagttcaaacttctaggatagcttcggaagcaaacagagagtttatattctcgtcttcttttgctggtgataaagaagtactggcatctgccagagaaggaagaaatgatgaaaatcaaaagaaaacgtcacaacagtctttgccagtctccgtcaagaatgcttccccgctgaaaaaatcagatgctaccattgagttggatagagatgaacctaaaaatcctgatgaaaatattgaagtatatatagatgaaaggggacgttttagaataaggaacagacacatgggaatccaaatgacacgtgatatccagaggaacttacatttgatgaaagaaaaggagagaacagcttctggttctatggctaagaatgatgaaacattcagcgcctgggagaactttcctactgaggaccaatttcttgaaaaatcacctgttgagaaagatgttgtggacctggagatccagaatgatgattccatgctgcatcctccatcttccatagagatatcatttgaccatgatggtggtggaaaagatctcaatgatgaagatgatatgtttcttcaattggcagcgggaggaccagtgacaattagttctacagaaaatgatcctaaagaagacacttcaccgtgggcttctgacagtgattgggaagaagtgcctgttgaacagaatacttctgtctctaagcttgaagcgaatttaagcaatcagcatatccccaaggacattagtatcgctgagggtgtagcatgggaagaatatagttgtaaaaatgccaataactccgtggagaatgatacagtaacaaagatcacaaaaggatatctggaagaagaagctgatctgcaggaggctatcaagaaaagtcttcttgaattacacgataaggaatccggggatgtccttgaagaaaatcaatcagtaagggtaaatcttgttgttgacaagccaagcgaagatagtctttgttctagggaaacggttggtgaagctgaggaagagagatttctggacgaaataacaatcttgaaaaccagtggtgctataagtgagcagtccaacacttctgtagcgggcaatgcagatggtcagaaagggataaccaaacaatttggtacacacccttcttccggttctaataacgttagccatgctgtgagcaataaattgtcaaaggtaaaatcagttatctcacccgagaaagcattaaatgttgctagtcaaaaccgcatgctatccaccatggctaaacagcacaatgaagaaggttctgaaagttttggtggagaatctgttaaagtgtctgctatgcccatagctgatgaggaaataactggttttcttgatgaaaaagataatgctgatggtgaatcatctatcatgatggacgataagagagattatagtagacgtaaaatccagagtcttgtcactgaatcaagggacccttctcgtaatgtcgtcagatcgcgaatagggatactacatgacacagattcacaaaatgaaagaagggaggaaaataactctaacgagcacactttcaatattgacagttcaacagattttgaagagaaaggcgtgcctgttgaattttcagaggcaaatatagaggaggaaattcgagttctcgaccaagaattcgtaagtttaggtgatgaacagagaaaacttgagcggaatgctgaatctgtgagcagtgagatgtttgcagaatgccaggagctactccaaatttttggcataccgtacatcatagctcccatggaagcagaggcacagtgtgcatttatggaacaatcaaaccttgttgatggcattgtcactgacgattctgatgtattcttgtttggagcaaggagcgtgtacaaaaatatatttgatgatcgtaaatatgtggagacatactttatgaaggacattgagaaggagttaggcttgagcagagataaaataatccgcatggcaatgcttctaggaagtgattacacagaaggaatcagtggtattggtattgtcaatgctattgaagttgtgactgcttttcccgaggaggatgggcttcagaaatttcgtgaatgggttgaatcacctgatccaaccattttaggaaagactgatgcaaaaacaggttcaaaggtaaagaagcgtgggtctgcctccgtagataataaaggaatcatctcaggtgcctcgactgatgacaccgaagaaatcaagcaaatcttcatggatcagcatagaaaggtaagcaagaactggcatattccattgactttccctagtgaggctgttatatcagcctacttaaatccgcaagtggatctgtcgactgagaaattctcatggggcaaacctgatctttcagtacttagaaagctatgctgggaaaagtttaattggaacggcaagaaaacagatgaactactactaccagtcttgaaggagtatgaaaagcgcgagacgcaacttcggattgaagctttctattcctttaatgaaagatttgcaaagatccgtagtaaaagaatcaacaaagctgtcaaaggaattggtggaggtctgtcgtcagatgtggccgatcatactctccaggaaggtccaagaaaacgaaataagaaaaaagttgctcctcatgaaactgaagataacaacacttcagacaaagattcacctatagccaatgagaaagtgaaaaacaaaaggaagcgcttagaaaaaccatctagtagtagaggtagaggcagagcccagaaaagaggacgaggaagaggaagagtccaaaaagatctccttgagctatccgacggcagttctgatgatgatgatgacgatgacaaggtagtggaattggaggcaaaaccggccaatcttcaaaaatcaacacgatctcggaatcctgtgatgtacagtgcaaaagaagatgatgaattggacgagtcaagaagcaatgaaggatctccgagtgagaatttcgaagaggttgacgaaggcagaataggaaatgatgattctgtagatgcatcaatcaacgactgtccttccgaagactacattcaaacgggaggtgggttctgtgcagatgaagctgatgagattggagatgctcatttggaagataaagctaccgatgattacagagtgatcggtggcggattctgtgttgatgaagatgaaacagctgaggaaaacacaatggatgatgatgcagaaattttaaagatggagagtgaagaacaacgaaagaaaggtaaacgtcgaaacgaagaagatgcatcattggatgagaatgttgacattcattttgggaattcttcagctggaggattaagtgcgatgcctttcttgaagagaaagaagagaaaaaactga

SEQ ID NO: 661 - protein, 1479 aa, Arabidopsis thaliana
MGVQGLWELLAPVGRRVSVETLANKRLAIDASIWMVQFIKAMRDEKGDMVQNAHLIGFFRRICKLLFLRTKPIFVFDGATPALKRRTVIARRRQRENAQTKIRKTAEKLLLNRLKDIRLKEQAKDIKNQRLKQDDSDRVKKRVSSDSVEDNLRVPVEEDDVGASFFQEEKLDEVSQASLVGETGVDDVVKESVKDDPKGKGVLLDGDDLDNLVQDSSVQGKDYQEKLDEMLAASLAAEEERNFTSKASTSAAAIPSEEDEEEDSDGDEEILLPVMDGNIDPAVLASLPPSMQLDLLAQMREKLMAENRQKYQKVKKAPEKFSELQIEAYLKTVAFRREINEVQRSAGGRAVGGVQTSRIASEANREFIFSSSFAGDKEVLASAREGRNDENQKKTSQQSLPVSVKNASPLKKSDATIELDRDEPKNPDENIEVYIDERGRFRIRNRHMGIQMTRDIQRNLHLMKEKERTASGSMAKNDETFSAWENFPTEDQFLEKSPVEKDVVDLEIQNDDSMLHPPSSIEISFDHDGGGKDLNDEDDMFLQLAAGGPVTISSTENDPKEDTSPWASDSDWEEVPVEQNTSVSKLEANLSNQHIPKDISIAEGVAWEEYSCKNANNSVENDTVTKITKGYLEEEADLQEAIKKSLLELHDKESGDVLEENQSVRVNLVVDKPSEDSLCSRETVGEAEEERFLDEITILKTSGAISEQSNTSVAGNADGQKGITKQFGTHPSSGSNNVSHAVSNKLSKVKSVISPEKALNVASQNRMLSTMAKQHNEEGSESFGGESVKVSAMPIADEEITGFLDEKDNADGESSIMMDDKRDYSRRKIQSLVTESRDPSRNVVRSRIGILHDTDSQNERREENNSNEHTFNIDSSTDFEEKGVPVEFSEANIEEEIRVLDQEFVSLGDEQRKLERNAESVSSEMFAECQELLQIFGIPYIIAPMEAEAQCAFMEQSNLVDGIVTDDSDVFLFGARSVYKNIFDDRKYVETYFMKDIEKELGLSRDKIIRMAMLLGSDYTEGISGIGIVNAIEVVTAFPEEDGLQKFREWVESPDPTILGKTDAKTGSKVKKRGSASVDNKGIISGASTDDTEEIKQIFMDQHRKVSKNWHIPLTFPSEAVISAYLNPQVDLSTEKFSWGKPDLSVLRKLCWEKFNWNGKKTDELLLPVLKEYEKRETQLRIEAFYSFNERFAKIRSKRINKAVKGIGGGLSSDVADHTLQEGPRKRNKKKVAPHETEDNNTSDKDSPIANEKVKNKRKRLEKPSSSRGRGRAQKRGRGRGRVQKDLLELSDGSSDDDDDDDKVVELEAKPANLQKSTRSRNPVMYSAKEDDELDESRSNEGSPSENFEEVDEGRIGNDDSVDASINDCPSEDYIQTGGGFCADEADEIGDAHLEDKATDDYRVIGGGFCVDEDETAEENTMDDDAEILKMESEEQRKKGKRRNEEDASLDENVDIHFGNSSAGGLSAMPFLKRKKRKN

SEQ ID NO: 662 - DNA, 3711 bp, Drosophila melanogaster
atgggagttacgggcttgtggaagctcattgagccgtgcggcaagccagtccccgtagagactttggagggcaaaatcctagcagtggatatatcgatttggttgcatcaggttgtgaagggctttcaggacaacaagggatcggccctgagtaatgcccatttactgggtctattccatcgtctctgtaaattgctatactatcgtgtgcgaccggttttcattttcgatggatgcgtgccgcagcttaaaagggacactattgcacgtcgccagcagcagaggaataagctcagcaacgaagctgatcgcattcaggctttgctccttcaatccctggccaaagaaaaagtagtgcagcaagcgctgggcaagaatgcagagctactgttgaaatccccggttaagcgaccgcctccagctaagaagaacgacgaggatgacttgtttaagcttcccgaactgccggctgcatcggtgcaagataatcaagatgaaagcgagcaggacaccagtgccagtgcctcagacagctcctttgacgagtcaaccgctcgacattcttacaactctagcttacaggccatcgatgtaaagagtcagcattttcggaatctgccagccgatgtgcgacacgagatccttacagacatcaaggagacgcgcaagcaatcgtcgtggggccgtctgcacgagttgcccgcccgcagcgatgacttctgctccttccagatgaagagactcctcaagcgccgagccgttcaggaaagcttagagcaggcggaacaggagatgggcggacatacgcttacctatgcagagttgtgtgactttttcaatgaggagggcattctcaccccaacggccattgaacagtgcacccgacaaattagctcggatgaacatacacgattcctgctggtcagggatcttaaaaagaaagcaatggagagcaccaaacaagaggttaaaatggagatgattgaggaggtacccgctgaggaggaggatgagaagccaagcacttccaccaagaaagaggctgtgaaaagtgtggacctaggcacagagttcgatgaagatttggccaaagcactgtctatgtcaatggaggagaccaaggtgtacgatgaaaaggactacgagtacgactcggaccaagagttgcgcctcaatcgagctcaaaccaagcaattgcgccatgcggccaagggacctgcacgggcctatatgattgaatacggcggaatgaacgacgaggaagttggcaacatcatggaggccactcagttcaatgacactcaaagccttgaaaagttgctagagatcacgacagtcccgaccgacatggctgacaactcgattgaggaggccaaacttatttcacaagctattgaagagagcaaacaactatcccaagcaattgaggaaagcaagaagaatcttaacgaggacaaggtggagattgtagatactgataccgactcagacttggaggaagtaatggaagttcaggagctggataaaggcaagaagaatcttgagatttgtgttgatattactggccaagcggattcgaatgatctgtttgcggatatttttgaggatggagaggcaaataaaatagagaaaactataagcgtcgaggaagacgatgactttatagaagtgaaagacagtgaggaattaaaattggatactgaagatgaaaataaaccaataacgaataagagtattaaagaaagtaatgaagtcaagccgttcattgatgaaattatcgaagtgaaagatagccaagaagcggttcctgcagaacctaatctcaaacccgatctggaatcaattttaaatgatctgaaaaaacaaacggctgcggttaaagatattcagctaaacgtaaatgaagaagaaaaaccaaaaccaaaggtggaaatcagttctatattggatgagctaaaagtaaagatggccgacgttaaaaacatcactctagataacgtgaaattaagcaatagtgtccctatcatactatcctccgatgacgaaagtaccttgaaatcctcgaaaatagttccgaagcaagagctaattgagttgtgcgacagcgacgataataaaaacaatcgcctatcaccgaacaaaacgccaagcaaaaacaagtccattaaggacttttttgagaccagttacgtggtcaagcgaactcccgacaaatctcaagcgtcaaacgaaacttcgccgggaacaccaaagaccccgaagcccttcttcagaaagagaaccccgaagtccggacggaaacgagctagtgatgccaatgaggacagtgatgaggaagtttcgcccactaaaaggtccagtaaggcctcgaagtctctcttcgagccaaaggagccggaagaagaaaagactgtagatccggaggagattatcaaagatgctgcagaggctcttaaatctcaaaagacctcagaagaactgcaggagttggctacaaacttagctcaggagcgaaaggaacttgaaatcgagcggaatcggcaagaccgaatgggcatgtccatcagccagcgcatgagcatcgattgccaggagctgctgcgtcttttcggcattccgtacattgtggctcccatggaggcagaggcgcagtgcgcctttctcaatgccacagatcttacccacggcaccatcacggatgatagtgatatctggctttttggtggtcgaactgtctacaagaacttctttgcacaaaacaagcacgtgatggaattccgggcggaacagatcgagcaaacgtttaactgcaacaggggtaaactgatccagttggcctgtttggtgggcagtgactacactacaggaattcatggcattggtgctgtaacggccctggagattttggcctccttttccggacaggatgcgaatgggccaggtatctgcaatcaatcggtgcttcaaacgctaatcaagttccgcgactggtggcaagcacacaagtgcagcaatcttccacctggcagctcggctcgccttgctctgcgcaaaaaacttaagaacatcgaactgcacgagggttttcccagcggtgcagtggtggaggcatatttagcgcccacgatcgacgacaatcgggatgcatttagttggggcacaccggatgtggaatcaatcagagaattcacgcgaaaatctttcggctggactacttcaaaaacggacgacattctgatgcccgtgatgaaaaaaattaacgagaagaagatacagggttccatacgcaactactttacggcaaagagtgctctgcgagttcaacaaccgcacgtcagcaaacgtgtccaattggcaattgacaagatgtccggaaagatcgatgagacgccggagaaaccgaagaaggtgacacgcacaagacgtgcaaaggcagctccgccaacagatgatgatttggccatcgcggatgtcgcgacaaaagctgcccgtcccaaacgcggcaaacgaaaagctgcacctgaatcggtagttttggatggggaacttccttccacatcgcagtcgataccgaagcctgaaaaatgtcctcgaatacctagcagcgttgaagttatacctcaaagggaaaaggatctggagcagatgcgcctcaataaagcaaaggcggcagagattcttaaaaattcagcgaaagccaataggaaataa

SEQ ID NO: 663 - protein, 1236 aa, Drosophila melanogaster
MGVTGLWKLIEPCGKPVPVETLEGKILAVDISIWLHQVVKGFQDNKGSALSNAHLLGLFHRLCKLLYYRVRPVFIFDGCVPQLKRDTIARRQQQRNKLSNEADRIQALLLQSLAKEKVVQQALGKNAELLLKSPVKRPPPAKKNDEDDLFKLPELPAASVQDNQDESEQDTSASASDSSFDESTARHSYNSSLQAIDVKSQHFRNLPADVRHEILTDIKETRKQSSWGRLHELPARSDDFCSFQMKRLLKRRAVQESLEQAEQEMGGHTLTYAELCDFFNEEGILTPTAIEQCTRQISSDEHTRFLLVRDLKKKAMESTKQEVKMEMIEEVPAEEEDEKPSTSTKKEAVKSVDLGTEFDEDLAKALSMSMEETKVYDEKDYEYDSDQELRLNRAQTKQLRHAAKGPARAYMIEYGGMNDEEVGNIMEATQFNDTQSLEKLLEITTVPTDMADNSIEEAKLISQAIEESKQLSQAIEESKKNLNEDKVEIVDTDTDSDLEEVMEVQELDKGKKNLEICVDITGQADSNDLFADIFEDGEANKIEKTISVEEDDDFIEVKDSEELKLDTEDENKPITNKSIKESNEVKPFIDEIIEVKDSQEAVPAEPNLKPDLESILNDLKKQTAAVKDIQLNVNEEEKPKPKVEISSILDELKVKMADVKNITLDNVKLSNSVPIILSSDDESTLKSSKIVPKQELIELCDSDDNKNNRLSPNKTPSKNKSIKDFFETSYVVKRTPDKSQASNETSPGTPKTPKPFFRKRTPKSGRKRASDANEDSDEEVSPTKRSSKASKSLFEPKEPEEEKTVDPEEIIKDAAEALKSQKTSEELQELATNLAQERKELEIERNRQDRMGMSISQRMSIDCQELLRLFGIPYIVAPMEAEAQCAFLNATDLTHGTITDDSDIWLFGGRTVYKNFFAQNKHVMEFRAEQIEQTFNCNRGKLIQLACLVGSDYTTGIHGIGAVTALEILASFSGQDANGPGICNQSVLQTLIKFRDWWQAHKCSNLPPGSSARLALRKKLKNIELHEGFPSGAVVEAYLAPTIDDNRDAFSWGTPDVESIREFTRKSFGWTTSKTDDILMPVMKKINEKKIQGSIRNYFTAKSALRVQQPHVSKRVQLAIDKMSGKIDETPEKPKKVTRTRRAKAAPPTDDDLAIADVATKAARPKRGKRKAAPESVVLDGELPSTSQSIPKPEKCPRIPSSVEVIPQREKDLEQMRLNKAKAAEILKNSAKANRK

SEQ ID NO: 664 - DNA, 3891 bp, Glycine max
atgggagtccacggtctctgggaactcctcgcccccgtcggtcgccgcgtctccgtcgaaacccttgccggaaaaaccctagccgttgatgcgagcatatggatggtacagtttgtcaaagcgatgcgcgacgagaagggcgaaatggttcgcaacgcccatttgctgggcttcttccgtcgcatttgcaaacttcttttcctccgcaccaagccggtcttcgtcttcgacggcgggacccctgccctcaagcgccgcactgtcattgcacgccgccgccagcgtgaaaacgcccaagccaaagtccgcaaaaccgccgagaaattgctgctcaatcatttaaaggcattaaggttgaaggaactggctgatgatcttaagaaccaaaggatgaagaagaatagtgatactaagggtcagaaaaaatctaatcagaaggactttgttggaagtgatttaggaggaagtcatgtgaaagagctagatgaaattcattgtgggggaatgagacaatatttcatttttgtttgttgttgtaacatccttattttctttgttaatgctagtaaatttattgatatttcaattattgttgcttcatctaaattttttttctcccctcagccatcagtaaatgcagaagttgatatggctgtattagctgccttaccacaatcaatgcaacttgatattcttgcacagcttaaaggaaagaaaaccgaaggactagtaaaggaagttgacaatcagaatcaacatgatgtcaattatcggggcaagggtaaggggattctgctcattgaagctgacatggtaggttgtagctccagacatgacaatgttacatcaaggagtgacaatcaacactcaattgatgaaatgttagctgcatctattgctatggaggaaaatgaagagttagtaaataatacatcaacttctgttggggcttccgctattgaggaagaggaagttgactatgatgaagatgaagaaatgatactgccagctatgcatggtaaaattgatcctgctgttctagcctcattgcctccatcaatgcaactggaccttcttgttcagatgagagagcgtttgattgcagagaacagacaaaagtatcagaaagtcaaaaaggatccagcaaaattctctgagctacagatacaagcttaccttaaaactgtcgctttcagacgggacatagatgaagtgcagaaagctgcagctgtaggaggagtaggtggtgtacagacttcacggattgcatctgaagccaacagagaatatattttctcgtcttcttttactggtgataaacacttagagaaaaataaagatacacaacagaaggtccagggagtacatccttcacagaaccttacagatagcattgtggcaggaaatgattctaatacttcaagcggattggttcacaatgaacctggtgagcctgctgatgaaagtattcagacatatcttgatgagaggggtcggtttcgagttagtagattgagagctatggggatgcgtatgacctgtgatatacaacggaatttggatttgttgaaggagattgagcaggaaagagcatatgtgaacaaggctgcgaatattggaacagtggaaaatgctgagaataatggtccatatgaaagttctgggatccagcttgttggtaaatcacaagagatgaatgttgacttagttggacagaatatgcaaaatgaacaaacaatgcttgacagagatacattgatagagatatcttttgaatatgattgcaagaataagttcgcaaatgatgaggatgatatattttctagtttagtaggaggaaatccagtggcaatctttggtgctgatgatactgcagcaaccgaacaaccttctcattctgattcagattgtgattgggaagaaggaattctcgaaggtaagagtaatgcttatcctgaacatgacgtggtagaattgaagtcttctgttgcagatgatcataaaaataatgaaagagaagtagaatgggaggaaggagattgtgatggtgctaacagcaccttactgtcaggaaaattggcatctcaagggtggttggaggaggagtctgatttgcaagaggcaataaggagaagtcttgaaagtataggggatatgaaacttaaatgcatgccagctgtagatgagcattcaaatacttatgagaacaaattggattgtggtttagaacatggtgatgatctgtattattctgaccctgtggatttaaatgacaacgttgggtttctgaataataaaaatagggaagacagtactgaaaaaaatgaattacatgaaattgaagatggagataaaaagcatgattttgtttctggcaataatgaacaaactttccattttcatggaactgaggttagcttggaggaagaaatgcaaattcttggtcaagaatatatcaacctagaaaatgagcagaggaagctagagcggaatgcagaatctgtaaacagtgaattattcactgaatgtcaggaactactgcaaatgtttggcttgccatatattattgctccaatggaagcagaagctcaatgtgcttatttggaacttgagaaactagttgatggtgttgtgactgatgactctgatgtccttttatttggggcacgcagtgtttacaaaaatatatttgatgaccgcaaatatgtagagacatacttcatggaggatattgaaaaggagcttggattgaccagagaaaaattaatacgcatggctctacttcttgggagtgattatactgaaggtgtaagtgggattggcattgttaatgctattgaggttgtgaatgcattccctgaggaagatggcctcctgaaattccggcaatgggttgagtcaccggatcccaccatccttggaaggttggatgcaaatagtggttcaaattccagaaagaaaggttgcaatgttaaagagtctgcggtgatgcaaaacatctgccatgctcaggagcaaaatgagttgtcagattacatccaagaaataaaacaaactttcttcaataagcatagaaatgttagcaagaattggcacattccttcttcttttccaagtgatactgttatatctgcttactattctccccatgttgataaatccactgagccattcacatggggaaagccagatcatcttgttcttcgaaaattgtgctgggagaaatttgggtggactggccagaaagcagatgaattgatcctaccagtcttaaaggagtataacaagcgtgagactcaattgcggttggaagcattttacaattttaatgaaagatttgcaaaaattcgtagtaaaagaattaagaaagcggtaaaaggaatcactggtaagcagccttcagatttgatagatgattctgcagaagagttctccaagagtaggaagactgggagagaacctgaggatatcacattggagacttcaaggggaatagagggaaatcttgagggtagaaggaaatcaaaaataaaacagtcaaggaagaatgatactgttgctaaggaacagtcaaagaaaaagaaagtcaatgatgatccctcttcagcacctggtacatctgagattgagaatttacagccaagtctgcagatagaagaagagcaacatgatggtaaggcattgattcggaatagaagtggcagaggaagaggtagaattatgggaataaaaagaggaagggataacaaaggtctcagttttcaatcttgcgaaactgaagcctcatctggtagcagtgacattgatgatcatgggccaagagtgcatgtggatagagttccaaaagatgtgcgaagggtgaaccttcattccgatttttctgatttataa

SEQ ID NO: 665 - protein, 1296 aa, Glycine max
MGVHGLWELLAPVGRRVSVETLAGKTLAVDASIWMVQFVKAMRDEKGEMVRNAHLLGFFRRICKLLFLRTKPVFVFDGGTPALKRRTVIARRRQRENAQAKVRKTAEKLLLNHLKALRLKELADDLKNQRMKKNSDTKGQKKSNQKDFVGSDLGGSHVKELDEIHCGGMRQYFIFVCCCNILIFFVNASKFIDISIIVASSKFFFSPQPSVNAEVDMAVLAALPQSMQLDILAQLKGKKTEGLVKEVDNQNQHDVNYRGKGKGILLIEADMVGCSSRHDNVTSRSDNQHSIDEMLAASIAMEENEELVNNTSTSVGASAIEEEEVDYDEDEEMILPAMHGKIDPAVLASLPPSMQLDLLVQMRERLIAENRQKYQKVKKDPAKFSELQIQAYLKTVAFRRDIDEVQKAAAVGGVGGVQTSRIASEANREYIFSSSFTGDKHLEKNKDTQQKVQGVHPSQNLTDSIVAGNDSNTSSGLVHNEPGEPADESIQTYLDERGRFRVSRLRAMGMRMTCDIQRNLDLLKEIEQERAYVNKAANIGTVENAENNGPYESSGIQLVGKSQEMNVDLVGQNMQNEQTMLDRDTLIEISFEYDCKNKFANDEDDIFSSLVGGNPVAIFGADDTAATEQPSHSDSDCDWEEGILEGKSNAYPEHDVVELKSSVADDHKNNEREVEWEEGDCDGANSTLLSGKLASQGWLEEESDLQEAIRRSLESIGDMKLKCMPAVDEHSNTYENKLDCGLEHGDDLYYSDPVDLNDNVGFLNNKNREDSTEKNELHEIEDGDKKHDFVSGNNEQTFHFHGTEVSLEEEMQILGQEYINLENEQRKLERNAESVNSELFTECQELLQMFGLPYIIAPMEAEAQCAYLELEKLVDGVVTDDSDVLLFGARSVYKNIFDDRKYVETYFMEDIEKELGLTREKLIRMALLLGSDYTEGVSGIGIVNAIEVVNAFPEEDGLLKFRQWVESPDPTILGRLDANSGSNSRKKGCNVKESAVMQNICHAQEQNELSDYIQEIKQTFFNKHRNVSKNWHIPSSFPSDTVISAYYSPHVDKSTEPFTWGKPDHLVLRKLCWEKFGWTGQKADELILPVLKEYNKRETQLRLEAFYNFNERFAKIRSKRIKKAVKGITGKQPSDLIDDSAEEFSKSRKTGREPEDITLETSRGIEGNLEGRRKSKIKQSRKNDTVAKEQSKKKKVNDDPSSAPGTSEIENLQPSLQIEEEQHDGKALIRNRSGRGRGRIMGIKRGRDNKGLSFQSCETEASSGSSDIDDHGPRVHVDRVPKDVRRVNLHSDFSDL

SEQ ID NO: 666 - DNA, 3561 bp, Homo sapiens
atgggggtccaggggctctggaagctgctggagtgctccgggcggcaggtcagccccgaagcgctggaagggaagatcctggctgttgatattagcatttggttaaaccaagcacttaaaggagtccgggatcgccatgggaactcaatagaaaatcctcatcttctcactttgtttcatcggctctgcaaactcttattttttcgaattcgtcctatttttgtgtttgatggggatgctccactattgaagaaacagactttggtgaagagaaggcagagaaaggacttagcgtccagtgactccaggaaaacgacagagaagcttctgaaaacatttttgaaaagacaagccatcaaaactgccttcagaagcaaaagagatgaagcactacccagtcttacccaagttcgaagagaaaacgacctctatgttttgcctcctttacaagaggaagaaaaacacagttcagaagaggaagatgaaaaagaatggcaagaaagaatgaatcaaaaacaagcattacaggaagagttctttcataatcctcaagcgatagatattgagtctgaggacttcagcagcctgccccctgaagtaaagcatgaaatcttgactgatatgaaagagttcaccaagcgcagaagaacattatttgaagcaatgccagaggagtctgatgacttttcacagtaccaactcaaaggcttgcttaaaaagaactatctgaaccagcatatagaacatgtccaaaaggaaatgaatcagcaacattcaggacacatccgaaggcagtatgaagatgaagggggctttctgaaggaggtagagtcaaggagagtggtctctgaagacacttcacattacatcttgataaaaggtattcaagctaagacagttgcagaagtggattcagagtctcttccttcttccagcaaaatgcacggcatgtcttttgacgtgaagtcatctccatgtgaaaaactgaagacagagaaagagcctgatgctacccctccttctccaagaactttactagctatgcaagctgccctgctgggaagtagctcagaagaggagctggagagtgaaaatcgaaggcaggcccgtgggaggaacgcacctgctgctgtagacgaaggctccatatcaccccggactctttcagccattaagagagctcttgacgatgacgaagatgtaaaagtgtgtgctggggatgatgtgcagacgggagggccaggagcagaagaaatgcgtataaacagctccaccgagaacagtgatgaaggacttaaagtgagagatggaaaaggaataccgtttactgcaacacttgcgtcatctagtgtgaactctgcagaggagcacgtagccagcactaatgaggggagagagcccacagactcagttccaaaagaacaaatgtcacttgttcacgtggggactgaagcctttccgataagtgatgagtctatgattaaggacagaaaagatcggctgcctctggagagtgcagtggttagacatagtgacgcacctgggctcccgaatggaagggaactgacaccggcatctccaacttgtacaaattctgtgtcaaagaatgaaacacatgctgaagtgcttgagcagcagaacgaactttgcccatatgagagtaaattcgattcttctcttctttcaagtgatgatgaaacaaaatgtaaaccgaattctgcttctgaagtcattggccctgtcagtttgcaagaaacaagtagcatagtaagtgtcccttcagaggcagtagataatgtggaaaatgtggtgtcatttaatgctaaagagcatgagaattttctggaaaccatccaagaacagcagaccactgaatctgcaggccaggatttaatttccattccaaaggccgtggaaccaatggaaattgactcggaagaaagtgaatctgatggaagtttcattgaagtgcaaagtgtgattagtgatgaggaacttcaagcagaattccctgaaacttccaaacctccctcagaacaaggcgaagaggaactggtaggaactagggagggagaagcccctgctgagtccgagagcctcctgagggacaactctgagagggacgacgtggatggtgagccacaggaagctgagaaagatgcggaagattcgctccatgaatggcaagatattaatttggaggagttggaaactctggagagcaacctcttagcacagcagaattcactgaaagctcaaaaacagcagcaagaacggatcgctgctactgtcaccggacagatgttcctggaaagccaggaactcctgcgcctgttcggcattccctacatccaggctcccatggaagcagaggcgcagtgcgccatcctggacctgactgatcagacttccggaaccatcactgatgacagtgatatctggctgtttggagcgcggcatgtctatagaaacttttttaataaaaacaagtttgtagaatattatcaatatgtggactttcacaatcaattgggattggaccggaataagttaataaatttggcttatttgcttggaagtgattataccgaaggaataccaactgtgggttgtgtaaccgccatggaaattctcaatgaattccctgggcatggcctggaacctctcctaaaattctcagaatggtggcatgaagctcaaaaaaatccaaagataagacctaatcctcatgacaccaaagtgaaaaaaaaattacggacattgcaactcacccctggctttcctaacccagctgttgccgaggcctacctcaaacccgtggtggatgactcgaagggatcctttctgtgggggaaacctgatctcgacaaaattagagaattttgtcagcggtatttcggctggaacagaacgaagacagatgaatctctgtttcctgtattaaagcaactcgatgcccagcagacacagctccgaattgattccttctttagattagcacaacaggagaaagaagatgctaaacgtattaagagccagagactaaacagagctgtgacatgtatgctaaggaaagagaaagaagcagcagccagcgaaatagaagcagtttctgttgccatggagaaagaatttgagctacttgataaggcaaaacgaaaaacccagaagagaggcataacaaataccttagaagagtcatcaagcctgaaaagaaagaggctttcagattctaaacgaaagaatacatgcggtggatttttgggggagacctgcctctcagaatcatctgatggatcttcaagtgaagatgctgaaagttcatctttaatgaatgtacaaaggagaacagctgcgaaagagccaaaaaccagtgcttcagattcgcagaactcagtgaaggaagctcccgtgaagaatggaggtgcgaccaccagcagctctagtgatagtgatgacgatggagggaaagagaagatggtcctcgtgaccgccagatctgtgtttgggaagaaaagaaggaaactaagacgtgcgaggggaagaaaaaggaaaacctaa

SEQ ID NO: 667 - protein, 1186 aa, Homo sapiens
MGVQGLWKLLECSGRQVSPEALEGKILAVDISIWLNQALKGVRDRHGNSIENPHLLTLFHRLCKLLFFRIRPIFVFDGDAPLLKKQTLVKRRQRKDLASSDSRKTTEKLLKTFLKRQAIKTAFRSKRDEALPSLTQVRRENDLYVLPPLQEEEKHSSEEEDEKEWQERMNQKQALQEEFFHNPQAIDIESEDFSSLPPEVKHEILTDMKEFTKRRRTLFEAMPEESDDFSQYQLKGLLKKNYLNQHIEHVQKEMNQQHSGHIRRQYEDEGGFLKEVESRRVVSEDTSHYILIKGIQAKTVAEVDSESLPSSSKMHGMSFDVKSSPCEKLKTEKEPDATPPSPRTLLAMQAALLGSSSEEELESENRRQARGRNAPAAVDEGSISPRTLSAIKRALDDDEDVKVCAGDDVQTGGPGAEEMRINSSTENSDEGLKVRDGKGIPFTATLASSSVNSAEEHVASTNEGREPTDSVPKEQMSLVHVGTEAFPISDESMIKDRKDRLPLESAVVRHSDAPGLPNGRELTPASPTCTNSVSKNETHAEVLEQQNELCPYESKFDSSLLSSDDETKCKPNSASEVIGPVSLQETSSIVSVPSEAVDNVENVVSFNAKEHENFLETIQEQQTTESAGQDLISIPKAVEPMEIDSEESESDGSFIEVQSVISDEELQAEFPETSKPPSEQGEEELVGTREGEAPAESESLLRDNSERDDVDGEPQEAEKDAEDSLHEWQDINLEELETLESNLLAQQNSLKAQKQQQERIAATVTGQMFLESQELLRLFGIPYIQAPMEAEAQCAILDLTDQTSGTITDDSDIWLFGARHVYRNFFNKNKFVEYYQYVDFHNQLGLDRNKLINLAYLLGSDYTEGIPTVGCVTAMEILNEFPGHGLEPLLKFSEWWHEAQKNPKIRPNPHDTKVKKKLRTLQLTPGFPNPAVAEAYLKPVVDDSKGSFLWGKPDLDKIREFCQRYFGWNRTKTDESLFPVLKQLDAQQTQLRIDSFFRLAQQEKEDAKRIKSQRLNRAVTCMLRKEKEAAASEIEAVSVAMEKEFELLDKAKRKTQKRGITNTLEESSSLKRKRLSDSKRKNTCGGFLGETCLSESSDGSSSEDAESSSLMNVQRRTAAKEPKTSASDSQNSVKEAPVKNGGATTSSSSDSDDDGGKEKMVLVTARSVFGKKRRKLRRARGRKRKT

SEQ ID NO: 668 - DNA, 4413 bp, Oryza sativa
atgggagtgcacgggctgtgggagctgctggctcccgtggggcggcgcgtgtcggtggagaccctggcggggaagcggctggcggtggacgcgagcatctggatggtgcagttcatgcgggcgatgcgggacgacaagggcgacatgatccgcgacgcccacctcctcgggttcctccgccgaatctgcaagctcctcttcctccgcgcgcgcccggtcttcgtcttcgacggcgccaccccggccctcaagcggcgcaccctcgccgcccgccgccgccaccgcgacgccgcccaggccaaggtccggaagaccgccgagaagctcctgctctcccatctcaaggctaggaagcttgaagaattggcagctcaaatcaagagtgacagggctaagcatgacaataaaggcaagcaagttgagagcagtaaaatgggagaaattgagaaaattaatggagagcaaaagaaaaacaacgatggagaaaacagcggggggattgtagcaccaatcgaccaggagaaactggatgaactgctggccgcatcacttgctgcagaggaagaggcaaatttgactggcaaaggaaaacagtatactgtaagtgttccattgcaagaagcagctgacattagtgaggatgatgacgaggatgatggagagatgatctttcctatgacaacaggtgatattgatcctgcagtattagcttcactccctccatcaatgcagttggatcttcttgttcagatgagggagagagtgatggctgaaaacaggcagaagtaccagaaaattaaaaaggaacctgcaaaattctcagagctccaaatacagtcgtacctgaaaactgttgctttcaggcgagagatagatgaagttcagaggggtgctgcaggcaggggtgttggaggcgtccaaacatcaaaaatagcatctgaagctaacagagagttcattttctcatcatcattcactggtgataaacagacattagcacaaagaggcggaaaggagcatattgtcgatagcattaaatcaaagagggaaatcaatcctgctgtcttcaaatccaatcccactagtagttctagctcaattaagcctaacaacagtgagcctttggggagttttggacctgatgttgagacatatcgtgatgagagaggaaggattagagtaagtagggtcaaagcaatgggaattcgtatgactcgtgatattcaaaggaatttggattttatcaaagagcatgaacaggtcagaaacagggggcatgactctgtagttgaaggattagctaacaatgaagagcctccagattttccagaacatctttttgaaggtaatgggctgcggagttctcttcatctcagcgaagattatgatgaaactgctagcgataaccatcacacatcatcactagtaggatctgacaaaatttctgagggtgattatcatggaagcaaagaaacaatagagatatcctttgctgacgatcaaacagaagtgaaggacaatgatgaccaaattttcttgcatttagcttctggagcttcatccaacttattcactacagaacagactgatggctctgattgcattacaaaagaaggcgtacttgaaagtgaaacacctcctatgcaagttgatgagaaggatcaccaagcatcactgatggacaatttctgtactgatgatgagatagagtgggaagaaggtggttgtgatgttcctggaggtccttccagtaatgaaaacgatcaatctaaagtaccgaaaggagatctagaagaagatgcccttgttcaggaagctataaggagaagtttagaggattttaagaagcaagaacatgaaaatgtgacccctgaagatttacaggcatcttttgaagacaaacctttgcaatcttatgatgatgttcctaagccagctggagctgcaggaaagacagctgataaaattgggaaggaaataaattgtgaagagaatgatatagtgcatggatcacttgtagttgatggacgagaaaacgagaatcagactcaacccgagaatagtgatgggcatgccgatatgaagagagcttatttgttggatcctctccctccatgtaatatgaccgccagtactagtgctgcaaaatcacctgagggctcagaagttcagcaccacaattcaatgttacattcaatcagaactcccgagtggcctaagaacgatagcgataaagttatgacgcaatacagtttgaattctgataattcaaagtgcaaaatagatgattcttgtactggagaaacctcgaggtcactccaaaatgaccttttgatggatgaactggttcctgacactgctgtacaaaaagaaaatatgatccagagaactacggacttatccacatctgagataaactatacgaaactgaacgataatgttggtatatatagtgtgtcagctagtaatctagaaaaggaattatctcttctgagacaggaacaagaatatctcggaaatgaaaggcggaagcttgaaagccacgcagagtctgtcagcagtgagatgtttgctgaatgccaggaattgcttcaaatgtttggcttgccatatataattgcacctatggaagctgaagctcagtgtgcatacatggaaatgactaaccttgtcgatggagttgttactgatgattcagatgttttcctgtttggtgcaaggaatgtttataagaacatatttgacgataggaaatatgttgaaacatacttaatgaaggacattgagtctgagcttggtctaacaagagaacaattaatacgtatggcaatgcttcttgggagtgactacactgaaggaattagtggcattggcattgtgaatgctattgaagttgcacacgcatttcctgaggaagatgggctccaaaagttcagggagtgggttgaatcaccagatccaactttactgggaaaacttggtatggaaagtggtagcagctcaaagaaaaaaaagtctggcagaaatcattcagacggaaagggaaacagccttgagcctgaatacgctaaaggttctgatgacagccaatcttctaatgagacccaacgcatcaaggaaatatttatgagtaagcataggaatgtgagcaagaactggcatattccttctacttttcctagtgaagcagtcataaacgcatatatttccccacaagttgatgattcaacagaaccattttcctggggaagaccagattcaggcttactgcgcaagttatgttgggaaaggtttgggtggagcaaggaaaaggctgatgaactgctaattcctgttttgagagagtataataagcacgagactcaactacgcatggaggcgttttactcattcaatgagagatttgcaaaaattcgtagcaaaaggattaagaaagctatcaagggtattacagggaaaagctttctagagacagatgaacttgatcatgatagtcccagtactagtaataccagcaagaagaaagagagaacctcctctggtcgtggtagggctaaagggcaaagaaccaaagatgttgggcctggtaacacaggaaatcaggactatgacattgctgatagcttagtagatgcaggtgaacatactacagaaaaaagcacgtccagtaagaaaagaactgcaaactcctctggtggttcaagaggcaaaggaagaagaagcatgaatgctgcacatgtgataattggaaatggggaagattctgatgtctctaatttagcatctgatgaggattcccatattagacataccaacgactatgaatcagagggattgacattacgcaggtcaaataggaagcgtaagcaggtcacatacgcggaagatggtcaggaagctgatgataatgatgtttccatacatcaaatcgatgaaaatcagggccaaggttctttggaggaggacatgtgtcacatggctggacttgacacacaatctaatctgctccatcaggatacgagtgaattaaacatcgatcaaacgcatacagatccctctgatatgaacgaagatccttcgggctttgagttacccgaggattgccatacggacactgcaccaaaagactatctcttcaccggtggtggattctgcatggaagagggtgacgagcaagatacgggagtggatcaatctggtgcagaaatggagcatgaaacacgtgatgcctgtgagggtattgacgaggtttctgaaagtcaaagcggtaaaagcatgagctattcggcgactggagagggcacagagaatgcaaatacagaggcccgaggggcgtcttcatcgcagggacgcaatgcaagccgtggttcaggtgccgtgccgaagcttacaaagcgtaggagaaaatcatga

SEQ ID NO: 669 - protein, 1470 aa, Oryza sativa
MGVHGLWELLAPVGRRVSVETLAGKRLAVDASIWMVQFMRAMRDDKGDMIRDAHLLGFLRRICKLLFLRARPVFVFDGATPALKRRTLAARRRHRDAAQAKVRKTAEKLLLSHLKARKLEELAAQIKSDRAKHDNKGKQVESSKMGEIEKINGEQKKNNDGENSGGIVAPIDQEKLDELLAASLAAEEEANLTGKGKQYTVSVPLQEAADISEDDDEDDGEMIFPMTTGDIDPAVLASLPPSMQLDLLVQMRERVMAENRQKYQKIKKEPAKFSELQIQSYLKTVAFRREIDEVQRGAAGRGVGGVQTSKIASEANREFIFSSSFTGDKQTLAQRGGKEHIVDSIKSKREINPAVFKSNPTSSSSSIKPNNSEPLGSFGPDVETYRDERGRIRVSRVKAMGIRMTRDIQRNLDFIKEHEQVRNRGHDSVVEGLANNEEPPDFPEHLFEGNGLRSSLHLSEDYDETASDNHHTSSLVGSDKISEGDYHGSKETIEISFADDQTEVKDNDDQIFLHLASGASSNLFTTEQTDGSDCITKEGVLESETPPMQVDEKDHQASLMDNFCTDDEIEWEEGGCDVPGGPSSNENDQSKVPKGDLEEDALVQEAIRRSLEDFKKQEHENVTPEDLQASFEDKPLQSYDDVPKPAGAAGKTADKIGKEINCEENDIVHGSLVVDGRENENQTQPENSDGHADMKRAYLLDPLPPCNMTASTSAAKSPEGSEVQHHNSMLHSIRTPEWPKNDSDKVMTQYSLNSDNSKCKIDDSCTGETSRSLQNDLLMDELVPDTAVQKENMIQRTTDLSTSEINYTKLNDNVGIYSVSASNLEKELSLLRQEQEYLGNERRKLESHAESVSSEMFAECQELLQMFGLPYIIAPMEAEAQCAYMEMTNLVDGVVTDDSDVFLFGARNVYKNIFDDRKYVETYLMKDIESELGLTREQLIRMAMLLGSDYTEGISGIGIVNAIEVAHAFPEEDGLQKFREWVESPDPTLLGKLGMESGSSSKKKKSGRNHSDGKGNSLEPEYAKGSDDSQSSNETQRIKEIFMSKHRNVSKNWHIPSTFPSEAVINAYISPQVDDSTEPFSWGRPDSGLLRKLCWERFGWSKEKADELLIPVLREYNKHETQLRMEAFYSFNERFAKIRSKRIKKAIKGITGKSFLETDELDHDSPSTSNTSKKKERTSSGRGRAKGQRTKDVGPGNTGNQDYDIADSLVDAGEHTTEKSTSSKKRTANSSGGSRGKGRRSMNAAHVIIGNGEDSDVSNLASDEDSHIRHTNDYESEGLTLRRSNRKRKQVTYAEDGQEADDNDVSIHQIDENQGQGSLEEDMCHMAGLDTQSNLLHQDTSELNIDQTHTDPSDMNEDPSGFELPEDCHTDTAPKDYLFTGGGFCMEEGDEQDTGVDQSGAEMEHETRDACEGIDEVSESQSGKSMSYSATGEGTENANTEARGASSSQGRNASRGSGAVPKLTKRRRKS

SEQ ID NO: 670 - DNA, 5115 bp, Populus trichocarpa
atgggagtccaaggtctgtgggacttgctggctcccgtcggccgtcgagtatccgtagaaactctagccggcaagaaattagccatcgatgctagtatatggctggtccagttcatgaaggcgatgagagacgacaagggagagatggtacggaacgctcatttgcttggcttctttcgtcgaatttgtaagcttttgtatctccgcactaagcctgtcttcgtcttcgacggtgccacccctgctctcaagcgccgcaccgtcatcgctcgtcggaggctgcgagagaacgcccaggctaagatccgcaaaaccgctgagaaattgcttcttaatcaactgaagtcaatgaggctgaaagaactggcaaaggatcttgagaagcagaatgctgctaataagaagggcaagcagacgaagattttggaagagaataaacgtgtgctgtctgagtccgaaaagcttgatgaaatgctggcagcgtccattgctgctgaggaaggtgggagtttagataacaatgcatccacatctgctgctgctgctttggaggacatggatagcgatggagatggagatgaagagatgattttgccaccaatgaatgaggttgaagacccagctgtcttagctgctttgcccccattaatgcaacttgatcttctgttggagaaccagaatgacaagcacaaaaataatgcaaagggcaaggaaattttgtcggatcatactgaatttgaagggagcaatatgggaagagatcacgtggcagcagagagttacaatcaggagaagttagatgaaatgttggcagcatctatggtggctgaggaggaaggcagtgatgaagatgaagagatgatactgccacatgggaaggttgatcctgctgttttagcagctctgccaccatcaatgcaacttgatcttctggtccagatgagagagaaattgattgctgaaaacagacaaaggtatcaaaaagtcaagaaggtgcccgaaaaattctctgagcttcaaattcaggcttatcttaaaactgttgctttccgtcgtgagatagatcaagtgcagaaagctgctgctgggaatgatgttggtggtgttcaggcttcaaggatagcttctgatgcaaaccgagaatttattttctcatcatccttttctggggataaagagttgcttacaactgatggagtgaagagaagagaaggacatgagcaacaaaaggaaccattaaagcaaccatcttcagattttgtggctggtgttgcatctatctgtaagtccaatactgtgacaggattttcccaggatgaatctagcagtgcttttgatgatgatgttgagacatatcttgatgaaagaggtcgtatgcgagtcagtagagtcagagccatggggatgcacatgacccgtgatttgcaaaggaacttggatttaatgaaagaaattgaaaaggagaaaacgctttctatcaagactccaagtgctcggtctgtgcataacagaaataagattggtacccccagatgttttcccaatgaaaatcataatggagaaagttcacatggtatcgatggcaactccactaacttgaacaagatgaacgagcagtccttgttgagtaatgagacttctgtgcagatatcatttgaagttggtgacgagagcaagcattttagcagtgatgacgaagtgtttgcttctttagtagctgaaaagcctgtaaaaatctcttctgctggcaatagtacatcaagaagatattctgatgattctgcttctgatagtgactgggaggaaggaattgttaaaggaaaagctaatagttctcctaatgatgttgaattaagaactaagctgtctcctaaggttagcaatgttagcgatgatagtgaagtggaatggatggaaggagattctgatattcatgataactcctcctatctagctgaatcaaaaagaaaactagtttccaaaggtactttggaagaagaagctgctttgcaggatgctattaggagaagtcttcatgataagtcctcatatccagctaaatcaagaaatcaagtttctggaggttctatagaagatgaggctggtttgcaggatgccataatgagaagtcttaatgatcttgggagtgaaaaatccatccactcagaatctgaccctaaaaatgttaaaagctctagagggcatgcttatgaaggtgtgggctttctcaatcaagaagataatggttcagctatgctcaggaaggatgctacccaacaaagcaaatcaatctctgaaattttgggttttgaaaacctaggtgatgcaggtgaagttaatatctcacaagcctttccatctgtgggtagccaattaaagtcatctaaagctcataatcctgatgatgtggtgatgctaataaatgaatcacgtgaaagttatgtgcattctaatcctgcctggataagccaagatgtggataaaagggagaatgggtgccaaggcatgccatctattgaatcaattggccctttggaagcaaaggagaaccacttgaatttggaacctgcttctgaaattgagaatggtgggttatctgcctcccatgagaagtattcaagagatggctctcataccgctatagcagcatctacttatctacctcttactgagctaattgatgatagaaatgataagaaagcagagccatccatgttcattggtggagagaaaattagttctgaggctgagccaccatgcctttcagttgagaactctttcccagaagattcagtgaatggcagtgattttgcagagaaacttgatggagaaaaaaaagcagaagaccatcttagtgaaagggaatgctatatcagcaaatctgcatccatggataatgagaatgaacaggtcaattttacagaggctagtttggagaaggaaatgctaatactagatcaagaatatagtaatctaggagatgaacagagaaagcttgagcgtaatgcggaatcagtcaccagtgagatgtttgcagaatgtcaggagctgctgcagatgtttggcttaccatatattatagcaccaatggaagcagaagctcaatgtgcttatatggaacttgcaaattatgtcgatggtgctgtgactgatgattctgatgtcttcttgtttggagctcgaaatgtgtataagaatatatttgatgatcgtaaatatgtggagacatacttcatgaaggatatcgagaaagagcttggtctatcaagagagagattaattcgcatggctctgcttcttggaagtgattataccgagggagttagtggcattggcattgtcaatgctattgaggttgtgactgcattccccgaggaggatggccttcaaaaattcagggattggattgaatcaccggatccagctatcctaggaaagtttgatgttcaaactggtctgggtgtgaggaaaaaagagtcaaaggttggtggtagtgaagcaaaatgcacaggtaatggcatggaagggacgaatccatctggcctaaacattcctcaagctcatgaagaaaagcaatctgcagatcattctcaagtgataaagcaggttttcatggataagcatgtaagttcttacataattagtcatttccttgctgacacatacttcagctatcagcatgatagaaaagatcccaaatttaaatttgtacagagaaatgtgagcaagaactggcacattccttcttcttttccgagtgaagcagtcatttctgcgtattcttgtccgcaagtggacaaatcaactgagcctttcacgtggggaaaaccagatcttcatgctcttcacagattatgctgggaaaagtttgggtggcacattcagaagtcagatgagttgctacttcctgttctgaaggagtataataaacatgagactcaactacgactggaagcattttacagtttcaatgaaagatttgcaaaaattcgtagcaagagaatcaagaaggctgttaaagggatcactggaaaccaagacgctgacatgatggatgatcctgtggaagaagtttctaaaagtagaactggaaatatatctgggaaatctggtgacaatgaacctcagacacattcaaagagaactgcaagaactgctcctggcaataagagtagttttctggaaaaatcaaaaccaaagtggtccaggaaaaggactgctgagcagcctgtttttcctgaagttgagaatacagaggcaactgttaggccatgtagcgatagaggattcctaagaaacggaaaaggtagagggagaggtcggggaagaggaaggggaaggggaaaggcaaatctttgttttgaacaatcagattcaagctcttgtgatgttgatagtggtcatgatgagcatgaagtgcatgttgatgagtcaagtggcccacatgaattgcggaagtcaacacggttgcggaagcctgtaaattacacagtcgatgacttagaaattgatgatgtggagaagtccttggaccagggtgataaagaggggtttgacaaagaggcactgcatcaaggtttctcttcttctcaagaagcacgtggagatggtggcattggcatcaaagacaatgaacaacttgaagtgggagattcttcacttcagagcttctccagggattatcttgaagggggagatggattttgctttgatggagaggaagttggtgtccctggcgtggaccgaaatagctatttttcaaaggttgaactttctgatgatcaccttgaaaggggaggtggtttttgcctggacgaaagtgacgcaggcatggaccaaggcactaaccaaaacccacctacaacgggtgatcttttggaagatgttgagcatggcactgagctcttgaatgaggtcagagatggagggaggacgagtgcttgtgaaactgagttgaatgcagacagcgtggttgcagcagcacatgctggtggtcatttaaggagcagcgtctctggcccagaaataactaagaatgagacgggggcaactggtggtgcaggaagtctaagtgcaatgccgtacctgcttaaaagaaaacggaggaaaatgtga

SEQ ID NO: 671 - protein, 1704 aa, Populus trichocarpa
MGVQGLWDLLAPVGRRVSVETLAGKKLAIDASIWLVQFMKAMRDDKGEMVRNAHLLGFFRRICKLLYLRTKPVFVFDGATPALKRRTVIARRRLRENAQAKIRKTAEKLLLNQLKSMRLKELAKDLEKQNAANKKGKQTKILEENKRVLSESEKLDEMLAASIAAEEGGSLDNNASTSAAAALEDMDSDGDGDEEMILPPMNEVEDPAVLAALPPLMQLDLLLENQNDKHKNNAKGKEILSDHTEFEGSNMGRDHVAAESYNQEKLDEMLAASMVAEEEGSDEDEEMILPHGKVDPAVLAALPPSMQLDLLVQMREKLIAENRQRYQKVKKVPEKFSELQIQAYLKTVAFRREIDQVQKAAAGNDVGGVQASRIASDANREFIFSSSFSGDKELLTTDGVKRREGHEQQKEPLKQPSSDFVAGVASICKSNTVTGFSQDESSSAFDDDVETYLDERGRMRVSRVRAMGMHMTRDLQRNLDLMKEIEKEKTLSIKTPSARSVHNRNKIGTPRCFPNENHNGESSHGIDGNSTNLNKMNEQSLLSNETSVQISFEVGDESKHFSSDDEVFASLVAEKPVKISSAGNSTSRRYSDDSASDSDWEEGIVKGKANSSPNDVELRTKLSPKVSNVSDDSEVEWMEGDSDIHDNSSYLAESKRKLVSKGTLEEEAALQDAIRRSLHDKSSYPAKSRNQVSGGSIEDEAGLQDAIMRSLNDLGSEKSIHSESDPKNVKSSRGHAYEGVGFLNQEDNGSAMLRKDATQQSKSISEILGFENLGDAGEVNISQAFPSVGSQLKSSKAHNPDDVVMLINESRESYVHSNPAWISQDVDKRENGCQGMPSIESIGPLEAKENHLNLEPASEIENGGLSASHEKYSRDGSHTAIAASTYLPLTELIDDRNDKKAEPSMFIGGEKISSEAEPPCLSVENSFPEDSVNGSDFAEKLDGEKKAEDHLSERECYISKSASMDNENEQVNFTEASLEKEMLILDQEYSNLGDEQRKLERNAESVTSEMFAECQELLQMFGLPYIIAPMEAEAQCAYMELANYVDGAVTDDSDVFLFGARNVYKNIFDDRKYVETYFMKDIEKELGLSRERLIRMALLLGSDYTEGVSGIGIVNAIEVVTAFPEEDGLQKFRDWIESPDPAILGKFDVQTGLGVRKKESKVGGSEAKCTGNGMEGTNPSGLNIPQAHEEKQSADHSQVIKQVFMDKHVSSYIISHFLADTYFSYQHDRKDPKFKFVQRNVSKNWHIPSSFPSEAVISAYSCPQVDKSTEPFTWGKPDLHALHRLCWEKFGWHIQKSDELLLPVLKEYNKHETQLRLEAFYSFNERFAKIRSKRIKKAVKGITGNQDADMMDDPVEEVSKSRTGNISGKSGDNEPQTHSKRTARTAPGNKSSFLEKSKPKWSRKRTAEQPVFPEVENTEATVRPCSDRGFLRNGKGRGRGRGRGRGRGKANLCFEQSDSSSCDVDSGHDEHEVHVDESSGPHELRKSTRLRKPVNYTVDDLEIDDVEKSLDQGDKEGFDKEALHQGFSSSQEARGDGGIGIKDNEQLEVGDSSLQSFSRDYLEGGDGFCFDGEEVGVPGVDRNSYFSKVELSDDHLERGGGFCLDESDAGMDQGTNQNPPTTGDLLEDVEHGTELLNEVRDGGRTSACETELNADSVVAAAHAGGHLRSSVSGPEITKNETGATGGAGSLSAMPYLLKRKRRKM

SEQ ID NO: 672 - DNA, 4470 bp, Sorghum bicolor
atgggagttcacgggctgtgggaactgctggctccggtcgggcgacgcgtctcggtggagacccttgcggggaagcgggtggcggtggacgcgagcatctggatggtgcagttcatgcgggcgatgcgggacgacagcggcgagatggtccgggacgcccacctcctcgggttcctccgccgcatctgcaagctcctcttcctccgcgtccgccccgtattcgtcttcgatggcgccacgccggcgctcaagcgccgcaccctcgccgcccgccgcaggcaccgtgacgccgcgcaggccaaggtccgcaagacagccgagaagctcctgctctcccatctcaaagcgaggaagcttgaagaattggcagaacaaatccggagtgacagggctaagcatgatgccaagggcaaacaagttgagagcagtaaagaaggagaaactgagaaaacaagtcaaaaccaaattggtgataccaacaacagtgagggaaatgctgcatcaatcaatcaggagaaagtggatgaaatgctggccgcatcacttgctgcagaggaagaggcagatttcactgacgaaggaaaacaccattttacaagtgttccgttgccagaaggagctgaaattgatgaggatgaagatgatgatgaagggatgatcttccctatgacaactggtgacattgatcctgcagtattggcttcccttcctccatcgatgcagttagatcttcttgttcagatgagggagagagtgatggctgaaaacaggcagaaataccagaaaataaaaaaggaacctgcaaaattttcagagcttcaaatacagtcctatctcaaaacagttgctttccgtcgagagatagaccaagttcagaagtctgctgcagggaagggtggtggaggtgtccagacatcaaaaatagcatcagaagctaacagagagtttattttctcatcatcattcactggtgataaacagatgctggcacaaagacgtgaaaaggaacataatgttgagaacactaaatcaaaaaaggaaattaattcttctgtcttcacatctaacccaacaaatagtttgggaacaatgaagcctcccaacagcagtaaaccttcgagggattttgggcctgatgttgagacctatcgtgatgagagaggacgaattagagtaagcagggtcagagcaatgggaattcgtatgactcgtgacattcaaaggaatttagattttattaaagagaatgagcaggttaaaagtaagggacaaacgcagaccagtgttcacaatggatcaacaggcaatgaagaacctccagtttttccagagcatctttttgaaagtaacaagctccagagttcttgtaatcctgatgaggatctttctgaaactgacagagagaaccatcagacctcatcacaagtagaagcagcagataacatttctgagagttcttgtcatggaaacaaggaagcaatagagatatctttctcggttgatcaaactgaattgaaggatggcgatgaagatatatttttgcaactagtgtctgggtcgacatccaacatgttttctggcaataattgtttggttaaaaacacggaagaatctgaagattctgagtgtatttgggaagatggtgttattgaagcaggaacatctcctatgaaagttggcaagaacgatcataagtcatctctgccagagaattgcagcgatgatgagatggagtgggaggaaggtgatagctttgcacctggagttgcttctagtagtgaacataatccatgtaacgcaccaaagggggatttagaagaagcagctcttgtacaggaagcaataaggaggagtttagaggattttgagaagaaggcatctgagaatgtgagcactggagatatacaagaatctgttgaagatagatctttgcagttctccaataatgttcctaagatatctgaagctcttggtgaaaatgattcacattctggagtacctgttgttgaagagataaacaatgaaacaagaacagaaatcaattgtgataaggatgatatggtacagggcactggactacttggaattgatagacaagaaaatgaaacccgacctcaactggtgaaaaatgatgggcatctggggtctgtgcctctatgtactacattcacaagtaatctggctgaaaaaccatctaacagcacagaagctaacggtgaagatgtaatgatatttacaaccaaacttcctggaacagctgtaggcgattgtgataaaacttccaacctaaacattatgaattctgatcaatcaaaatgcagcaatgatattgcttcaactggagaaaccttgtcacatcaaaaggatcttttgattgatgaactgctagctgacactgctgaacaaaaagaaaatgctacccaagtagatctgaagtttgccacatctgagatagattatacacaaatttgtgacaatgatgacaaccatacaatatcagcgagttatgttgatgcagagctatctcgtcttagacaagaacagatagatcttggacatgaaaggcgaaaacttgaaagtcatgcagagtctgtaagcagtgagatgtttgccgaatgccaggaattgctccaaatgtttggcttgccatatattattgcaccaacggaagctgaagctcaatgtgcatacatggaaataaataacctcgttgatggagttgtcactgatgattcagacgtctttctgtttggagcaaggaatgtttacaagaacatatttgatgataggaagtacgtagaaacatattttatgaaggacattgagtctgagcttgggttaacacgagaacagttaatccgtatggctctgcttcttgggagtgactacactgaaggcgttagtggtatcggcattgtgaatgctattgaagttgtacatgcatttcctgaggaagatggactgcagaagtttaaagaatggattgaatcaccggatccatcaatatttggtaaactgcatgtggaagcaagtggtagatcaaagaaaagaaaacttggtggaaatgattcagatggaaagggtaaaggcctggaacctgaatgcattcaaggttctgatgataaacaatcttctaatgaggctgaacatgtaaaggaaatatttatgagtaaacataggaatgtgagcaagaactggcatatccctgcaacttttcccagtgaatcagttgtaaatgcatatatttctccacaagttgacaattcaatggagcctttttcctggggaagaccagatttaggcctactacgcaagttatgttgggaaaggtttggatggggcaaagagaaagctgatgaactgcttattcctgttttgagagagtataataaacatgagactcagttgcgcatggaggcattttattcattcaacgagagatttgcaaaaattcgtagcaaaaggattaagaaagccatcaagggcattacagggaaaagctttcttgacacagatgaacctgagccagataatcccagtactagcaagacgatcaagaagaaagaggcaaactcctcaagccatgccagaggtagaggaaaaaggaaaaacaattctggaatcaggaatatggaaagtcaagaagataatgtaggagataccaacagtttggcagatacagttgagattactagagaaaataacaataccactaagagaaaaagagggagcccctgtggtcgctccaaaggaagaggacgaagcaggacaaatgctggaaatgatgcaacaataagtcaggaggattatgaaatagagtattctacttcagcttcagatgaggattcatgtaaaaggcattccaacagttatggatcagaaggaagggcattgcgaaggtcaagtaggaagcggaaacaggtgacatacatggaagatggtcatgaagcatatgacaatgatgttccaatgcatcaaaacgatgaaaataacccaggccaagctgctgcagtcgcagacatggctggagaggacacagggtttaacctttaccatcaggatacaagtgaactgaacagcagtcggatgcatataggtgcaggcactaccgaagatatcaatgaagattcccaggactttgagttacgtgaggacaatcaggtggattcggcaccgaaagactatctgttcagtggtggtggtttttgtatggaggagggcgaaggcaacgaacaagaaccagcaggtcatcaatctggtgcagaaatagaacctgagccaagtggtccatgtgacgctatggatggagtttcagagagttgcaagagtgcgagcctgtcgaccgcgggagagtgtacagagaatgcaagcatggaggcccgtggtgcatcttcgtcgcagcagagacgcaaggcaagccgaggttttagtgccatgccgacgcttaccaagcgtaggagaaaatcgtga

SEQ ID NO: 673 - protein, 1489 aa, Sorghum bicolor
MGVHGLWELLAPVGRRVSVETLAGKRVAVDASIWMVQFMRAMRDDSGEMVRDAHLLGFLRRICKLLFLRVRPVFVFDGATPALKRRTLAARRRHRDAAQAKVRKTAEKLLLSHLKARKLEELAEQIRSDRAKHDAKGKQVESSKEGETEKTSQNQIGDTNNSEGNAASINQEKVDEMLAASLAAEEEADFTDEGKHHFTSVPLPEGAEIDEDEDDDEGMIFPMTTGDIDPAVLASLPPSMQLDLLVQMRERVMAENRQKYQKIKKEPAKFSELQIQSYLKTVAFRREIDQVQKSAAGKGGGGVQTSKIASEANREFIFSSSFTGDKQMLAQRREKEHNVENTKSKKEINSSVFTSNPTNSLGTMKPPNSSKPSRDFGPDVETYRDERGRIRVSRVRAMGIRMTRDIQRNLDFIKENEQVKSKGQTQTSVHNGSTGNEEPPVFPEHLFESNKLQSSCNPDEDLSETDRENHQTSSQVEAADNISESSCHGNKEAIEISFSVDQTELKDGDEDIFLQLVSGSTSNMFSGNNCLVKNTEESEDSECIWEDGVIEAGTSPMKVGKNDHKSSLPENCSDDEMEWEEGDSFAPGVASSSEHNPCNAPKGDLEEAALVQEAIRRSLEDFEKKASENVSTGDIQESVEDRSLQFSNNVPKISEALGENDSHSGVPVVEEINNETRTEINCDKDDMVQGTGLLGIDRQENETRPQLVKNDGHLGSVPLCTTFTSNLAEKPSNSTEANGEDVMIFTTKLPGTAVGDCDKTSNLNIMNSDQSKCSNDIASTGETLSHQKDLLIDELLADTAEQKENATQVDLKFATSEIDYTQICDNDDNHTISASYVDAELSRLRQEQIDLGHERRKLESHAESVSSEMFAECQELLQMFGLPYIIAPTEAEAQCAYMEINNLVDGVVTDDSDVFLFGARNVYKNIFDDRKYVETYFMKDIESELGLTREQLIRMALLLGSDYTEGVSGIGIVNAIEVVHAFPEEDGLQKFKEWIESPDPSIFGKLHVEASGRSKKRKLGGNDSDGKGKGLEPECIQGSDDKQSSNEAEHVKEIFMSKHRNVSKNWHIPATFPSESVVNAYISPQVDNSMEPFSWGRPDLGLLRKLCWERFGWGKEKADELLIPVLREYNKHETQLRMEAFYSFNERFAKIRSKRIKKAIKGITGKSFLDTDEPEPDNPSTSKTIKKKEANSSSHARGRGKRKNNSGIRNMESQEDNVGDTNSLADTVEITRENNNTTKRKRGSPCGRSKGRGRSRTNAGNDATISQEDYEIEYSTSASDEDSCKRHSNSYGSEGRALRRSSRKRKQVTYMEDGHEAYDNDVPMHQNDENNPGQAAAVADMAGEDTGFNLYHQDTSELNSSRMHIGAGTTEDINEDSQDFELREDNQVDSAPKDYLFSGGGFCMEEGEGNEQEPAGHQSGAEIEPEPSGPCDAMDGVSESCKSASLSTAGECTENASMEARGASSSQQRRKASRGFSAMPTLTKRRRKS

SEQ ID NO: 674 - DNA, 3787 bp, Vitis vinifera
atgggagtgcacggtctctgggaacttttggcccctgtcggtcgccgtgtgtctgtcgagactcttgccggaaaacgactcgccatagatgcgagtatatggatgatacagttcatgaaggcaatgcgagacgagaaaggagagatggtgaggaacggtcacctgttagggttcttccgacgcatatgcaagctcctcttcctacgcactaagcccgttttcgttttcgacggcggcacccctgccctcaagcgccgcaccgttgtcgctcgtcgccggcagcgagaaaatgctcaggccaagattcggaaaactgccgagaaattgctcctcaatcaccttaaggcaatgaggttaaaagaattggctaaggatttggagaatcagcggctgaacaacaatgataaggggaaaaaggttttatcatatcaaacggaaacggctggagaggtttctgaaggaaatagttcagtatccgggacttacaatcaggaaaagctagatgaaatgctttctttggtgcatcgaaaacatgtatgcttttcgaaattatgtttgaatctaggatgggaatgtactatcctttgcatgtatctgatatttagttttatgatgtatttgcaaaacagaatgaaatatgtcaagaaagttctcatcattatttgggttgacccaattatgaatggaaaagtcgatccagctgtattagctgcattgcctccatcaatgcagcttgatcttcttatgagagagaaattgatggcagaaaacagacaaaaatatcaaaaagtgaaaaaggcccccgcagaattttcagagttacaaatacaggcttatcttaaaaccgttgctttccgtcgggagatagatgaagtgcagaaatctgctgctgggaggggggtaggtggtgtgcagacttcacggatagcctctgaagccaatagagaatatattttctcctcatcatttactggtgataaagaagcacttacaaatggtggagtagagaaaaatggagataagcaatatcagataccaacagagtgtcctccagattccccaaataatgttgcatctaccagtaagtccaatactgccgcagaatcagttgcaggtgaacctgcaagtgtttttaatgatgatgttgagacatacctggatgagcgggggcgtgtccgagttagtagggtaagagctatgggaattcgtatgacccgagatctacaaaggaatttggatttgatgaaagagattgagcaggatagaactaatgaggataataacggaattgttacattaaacaaaacaaatgagcagtctatccctgacaatggggcttctatagagatatccttcgaagatgatggtgagcacaactgtttaaatggtgatgacgaattatttgctagtttggtagcaggaaatccagtgataatttcttcttctgatgctgctctctcaaacagacgaccagctgattctgcttcagattctgactgggaggagggaatcattgaagagaaaggtggtagctgtattgacaatgttggagtggaaattaaaccatctgttatggaagaaagagttagtgatgatagtgaagtggaatgggaggaaggaccttgtgatgtttcaaaaaatgtgtcagcatgcccatctaagtttggaaatcctgcttccaaaggaagattggaagaagaaactgatctccaggaagcaataaggagaagtcttgaagatttaggtggtgagaaagctgttggtgaatcatttaaagattcggatattaaggaatatgatgaaaaggatgttttggaggaaatgatgatccttgatcaggaatgcttaaatttgggagatgaacagaggaagcttgaaagaaatgctgattgtgtcagcagtgagatgtttgcagagtgccaggaacttctccaaatgtttggcttaccatatattattgcacctatggaagctgaagctcaatgtgcttatatggaacttgcaaaccttgttgatggagttgtaacagatgattcagatgtattcttgtttggagcacgaagtgtttacaagaatatatttgacgaacgcaaatatgttgagacctattttatgaaggacattgagactgagcttggattaaatagagaaaaagtaattcgcatggcactccttcttgggagtgattatactgagggtgttagtggaattggcattgttaatgctattgaagttttaaattcttttcctgaggaggacggtcttcataagttccgggagtgggttgaatcaccagatccaaacatcctaggaaaggttaatgttgaaactggatccagttcaaggaaacgaggatccaagaactggcacattccttcttcttttccaagtgaaacagttatctctgcatatgcctctccccaagtggaccagtcaacagagcctttctcgtggggaaaaccagatctttttgttcttcgcaaattgtgtttggaaaagtttggttggggtaaccagaaggctgatgagttgctactacctgttttgaaagagtacaacaaacatgagactcaattgcggttggaagcattttacactttcaatgagagatttgccaaaattcgtagtaagagaatcaaaaaggctgttaaaggaattaccgggagtcaaacctcagagttgttggatgatgctgtgcaagaaggttctaaacgtggaaagagaagcaaagagagtcctagtaaacttgacaacaaacaagaaattcctataaatgaaatagggagtactgctgctagaaatgggagcaatgctacagcaaaaacaactccaaagcagtcaagaagaagaaggatccgtaagcctgttccatctgatggagagagtgcagaacctcctgtgcaggcaggacagaagcaatgcaacgatacaggatcaagcaagaatggaagaggtaaaggaagaaagaaaggccggggagtcagaaggggaagaggaagaagtaggatacaagaaaatcctggctctgaaattagtggaaccagctccagtgactgtaacagtggcaatgaggaggaagttccagctcaaaagttggacgggtcaaatgaagtgcgaagggtaagtttttctctttcctgtgacccaatctatagcattggcatatattgttgttctggtagaaatagaacagagacctaaattcccttgggttggtttagttttcaggcatgctttgtctggttatggtttaaagatgtgaagagtccacagttcgtacattctagattggtgccttgcgcaaaccaatctaagttggggactgaagcaatttttttttttttttttaatttttaatttttacatgttctttataatcttccagtcaaaacgtcctcggaaggctgtgaattatgctaatgatgacttagaaattgatgacgagggcaagtcattagaccaaggcaaccaaaagtgcaccaatgaggaggcagtggagcttgagccatctagagatcagattatatgtggagatgctgctgctgatttcagtggaaagaaccaacaaaaagctgaagattcttcacctggagaagacttgtgtggagactacccagaaacagaaggtgtcatgtgcatggatgaaaatgaaataggtcagttagattcaagagatgatgatcccacttttgcggatgaattttctgaagattaccttaaaatgggaggtggattttgtgtggaagaagatgagaaagataaggaccacaatgctcgcacatatgac

SEQ ID NO: 675 - protein, 1066 aa, Vitis vinifera
MGVHGLWELLAPVGRRVSVETLAGKRLAIDASIWMIQFMKAMRDEKGEMVRNGHLLGFFRRICKLLFLRTKPVFVFDGGTPALKRRTVVARRRQRENAQAKIRKTAEKLLLNHLKAMRLKELAKDLENQRLNNNDKGKKVLSYQTETAGEVSEGNSSVSGTYNQEKLDEMLSLVHRKHVCFSKLCLNLGWECTILCMYLIFSFMMYLQNRMKYVKKVLIIIWVDPIMNGKVDPAVLAALPPSMQLDLLMREKLMAENRQKYQKVKKAPAEFSELQIQAYLKTVAFRREIDEVQKSAAGRGVGGVQTSRIASEANREYIFSSSFTGDKEALTNGGVEKNGDKQYQIPTECPPDSPNNVASTSKSNTAAESVAGEPASVFNDDVETYLDERGRVRVSRVRAMGIRMTRDLQRNLDLMKEIEQDRTNEDNNGIVTLNKTNEQSIPDNGASIEISFEDDGEHNCLNGDDELFASLVAGNPVIISSSDAALSNRRPADSASDSDWEEGIIEEKGGSCIDNVGVEIKPSVMEERVSDDSEVEWEEGPCDVSKNVSACPSKFGNPASKGRLEEETDLQEAIRRSLEDLGGEKAVGESFKDSDIKEYDEKDVLEEMMILDQECLNLGDEQRKLERNADCVSSEMFAECQELLQMFGLPYIIAPMEAEAQCAYMELANLVDGVVTDDSDVFLFGARSVYKNIFDERKYVETYFMKDIETELGLNREKVIRMALLLGSDYTEGVSGIGIVNAIEVLNSFPEEDGLHKFREWVESPDPNILGKVNVETGSSSRKRGSKNWHIPSSFPSETVISAYASPQVDQSTEPFSWGKPDLFVLRKLCLEKFGWGNQKADELLLPVLKEYNKHETQLRLEAFYTFNERFAKIRSKRIKKAVKGITGSQTSELLDDAVQEGSKRGKRSKESPSKLDNKQEIPINEIGSTAARNGSNATAKTTPKQSRRRRIRKPVPSDGESAEPPVQAGQKQCNDTGSSKNGRGKGRKKGRGVRRGRGRSRIQENPGSEISGTSSSDCNSGNEEEVPAQKLDGSNEVRRVSFSLSCDPIYSIGIYCCSGRNRTET

SEQ ID NO: 676 - DNA, 1191 bp, Aureococcus anophagefferens
atgggcatcaagggcctcatgggcgtcatcaacgagcacgcgcccggcgccgtcaaggagctcgtcatcgagggctacacgggccgcgtcgtcgccatcgacgcgtccatgagcctctaccagttcctcatcgcgatccgccaccagggcgagggcggcgcgccgtcgagcgtgctcacgaacgccgagggcgagcagacgtcgcacatccagggcatgttcaaccgcacgatccgcctgctccaggcgggcgtccgccccgtctacgtcttcgacggcaagccaccgaacatgaagggcggcgagctcgcgaagcgcacggcgaagcgccaggaggccgaggccgcgctcaagaaggccacggagaacgacgacgccgagggcatctccaagtacagcgcgctgctcaccaaggtctcgcggaaggactgcgacgacgtcaagcagctcctgcggctcatgggcgtgcccgtcgtcgacgcgccgtgcgaggccgaggcgcagtgcgcggagctcgtccgcggcggcaaggcccacgccgtcggcacggaggacatggacgcgctgaccttcgggtccacgcgccagctccgcaacatgacgttcacgaagaagtccaaggacgacaaggtcctcgagatcacgcacgcggcggtcctcgagggcctcggcctctccaacgccgagttcgtcgacttctgcatcctctgcggctgcgactacacgtcgacgatccgcggcgtcgggcccaagacggcgctgaagctcgtcaaggagcacggctccatcgaggccatcctcgccaagggcctcaaggccaagcagaggggcgacgtgcccgacgagtgggacgacgcggacgacggcccgttcgtgccggcctacgtcggcgcgcggaacctcttcaacaaccacgaggtcacgccctgcggcgacgtggagctgagctggggcaagccggacgaggcgggcctccgcgcgttcctcgtcgagcgcatgggcttcggcgagcagcgcgtcgagggcgcgctcaagcggctgacgtcggcccagggccagcgcacgcagcgccgcatggacagcttcttcaaggtgctcccgccgaagccgggcgcggcaccgaagaagcggcccgcgccggagaagaaggcgccggcgaagaagaagggcaagggcccgccgcgcaagtga

SEQ ID NO: 677 - protein, 396 aa, Aureococcus anophagefferens
MGIKGLMGVINEHAPGAVKELVIEGYTGRVVAIDASMSLYQFLIAIRHQGEGGAPSSVLTNAEGEQTSHIQGMFNRTIRLLQAGVRPVYVFDGKPPNMKGGELAKRTAKRQEAEAALKKATENDDAEGISKYSALLTKVSRKDCDDVKQLLRLMGVPVVDAPCEAEAQCAELVRGGKAHAVGTEDMDALTFGSTRQLRNMTFTKKSKDDKVLEITHAAVLEGLGLSNAEFVDFCILCGCDYTSTIRGVGPKTALKLVKEHGSIEAILAKGLKAKQRGDVPDEWDDADDGPFVPAYVGARNLFNNHEVTPCGDVELSWGKPDEAGLRAFLVERMGFGEQRVEGALKRLTSAQGQRTQRRMDSFFKVLPPKPGAAPKKRPAPEKKAPAKKKGKGPPRK

SEQ ID NO: 678 - DNA, 1617 bp, Aureococcus anophagefferens
atgggcataaaaggcctcttcccctacatccgggacaatgcgccgggcgccatcgtcgagacctcattgaaggactacatgggccggcgcctcgccgtcgacgcgtccatgcacctctactcgttcctcgcggccatccgcacgggcggcgacgcgacgcacctcacgaactcgcgcggcgaggcgacgagccacctccagggcttcgcgaaccgcacgctgcgcatgctcgaggccggcgcgaagcccgtcttcgtcttcgacggcgcggcgcccgagctgaaagggaagacgctcaagggccggagcgaggcgaagcgcgccgccgaggagaagctggcccgggcgcgcgacgccgactccggcgcgacgacggaggaggtctacaaggcggcgtcggcgtcgacgcgcgtgacgcggcagcacaacgacgacgtcaagcggctgctccgcctgatgggcgtgcccgtcgtcgaggcgcccggcgaggccgaggcgtcgtgcgtcgctcttgttaggcacggcgcctgcgacttcgtcgtcacggaggacatggacgcgctgaccttcggcgcggcgaagatggtgaagaacctcttcgacgtcgagggcgcgcgcgccaaggagaagcggcccgcgtacgagatcgacctcgccgcggcgctccgcgagctcgggccccggggcctggggaccatggcggcgttcgtcgacttctgcattttgtgcggctgcgactacctcgaccacgtgccgggcgtcgggcccgcgacggccgcgaagcttctgaagagccacgcaagcctcgagcgcgccgtcgtccgcgtcggccgcaaggtcggcgggcggcccgtcgcgccgcacggctgggacttccgcgccgcgcgcgcgctcttcttcgcgccgaccgtcgtcgccgccggcgagaccgtcgacgcgccgccgccggactacgcggcgctccgcgcgttcctcgtcgacggccacgagttcaacggcgaccgcgtcgacaagatggtcgcgcggctccgcaagtgccgcgaggccaagccccagaagcgcatcgacgacttcttctccaagagcccggccaagggcccggcccggagcccaccggcgaagcgggagccggagcccgcggcgaagccggagccggacggcgcggcgaagcgggagccggagcccgcggcgaagcgggagccagacggcgcggcgaagcgggagccggacggcggcgacgacatcggcctcgacgcgtacgtcgacgcgcgacaggagcggcggggcgcgccgccggccgccgcgccggcgccggcgccgcccgcggcgaagccggagcccggcgcgcgctcggtcgagccggagcccgccgccgcgcggcctcgagcgccgccgccctcgtcgccggcgtcgccgcgggccgccgcgcccatgtcgcccgcgtgccaggctttcttcagcggcgagctccgggacatctcggcgtcggcgtcgaagaagcgcaagtcgccggcgaagcggccgaagccggccgcgtccgccgaggtcgcgcgcgcgttcttcgccggcgagacgcgcgacgcgacgccgagcaagaagaagaagaaggcgggctaa

SEQ ID NO: 679 - protein, 538 aa, Aureococcus anophagefferens
MGIKGLFPYIRDNAPGAIVETSLKDYMGRRLAVDASMHLYSFLAAIRTGGDATHLTNSRGEATSHLQGFANRTLRMLEAGAKPVFVFDGAAPELKGKTLKGRSEAKRAAEEKLARARDADSGATTEEVYKAASASTRVTRQHNDDVKRLLRLMGVPVVEAPGEAEASCVALVRHGACDFVVTEDMDALTFGAAKMVKNLFDVEGARAKEKRPAYEIDLAAALRELGPRGLGTMAAFVDFCILCGCDYLDHVPGVGPATAAKLLKSHASLERAVVRVGRKVGGRPVAPHGWDFRAARALFFAPTVVAAGETVDAPPPDYAALRAFLVDGHEFNGDRVDKMVARLRKCREAKPQKRIDDFFSKSPAKGPARSPPAKREPEPAAKPEPDGAAKREPEPAAKREPDGAAKREPDGGDDIGLDAYVDARQERRGAPPAAAPAPAPPAAKPEPGARSVEPEPAAARPRAPPPSSPASPRAAAPMSPACQAFFSGELRDISASASKKRKSPAKRPKPAASAEVARAFFAGETRDATPSKKKKKAG

SEQ ID NO: 680 - DNA, 1149 bp, Aquilegia sp.
atgggtataaagggtttaacaaagttattagcggacaatgcaccaaaaggcatgaaagagcataaattcgagagttttttcggccgtaagattgccattgatgctagtatgagtatctaccagtttctgattgtggtgggaaggagtggaaccgaaatgctaacaaatgaagctggtgaagtaacaagccacttgcaaggaatgttttctcgaactatcagacttttggaagcagggataaagcccgcgtatgtctttgacggtaagccgccagatctgaaaaagcaagagttggccaaacggtattcaaaaagggcagatgccactgaagatcttgcagcagcaattgagactggtgataaggaagacattgagaagttcagcaagcggacagtgaaggtaacaaagcaacacaatgatgactgcaagaaacttctaagactcatgggagtgcctgtaattgaggctccttctgaagcagaggcagagtgcgctgcactttgcaagagtggaaaggtatatgctgtggcctctgaagacatggattctttaacatttggagctcctaaatttcttcgacatttgatggatccgagctcaagaaaaatcccagtaatggaatttgaagttgcaaagatactggaggagctaaatctcagtatggatcagttcattgacttgtgtattctttgtggatgtgactattgtgacagtattcgaggtattgggggacagactgctttgaagctcatccggcaacatggttctatagaaaatatactggagaacataaacaaagagagataccaaatacccgaggattggccttatcaagaagctcgacagcttttcaaggagcctctagtatctgttgacaacgaggaatctgagttaaaatgggcgactccagatgaagaggggttaataacctttctggtgaatgaaaatggcttcaacaatgaccgagtcacaaaggctattgaaaagatcaaagcagccaagactaagtcttctcaaggccggttggaatccttctttaagccaatggccagtgcatcggttgctatcaaacgcaaggaaacaccagagaaggccacaaaggaaactacatcaaaaaagccaaaagctggtggccgaaagaagaaatag

SEQ ID NO: 681 - protein, 382 aa, Aquilegia sp.
MGIKGLTKLLADNAPKGMKEHKFESFFGRKIAIDASMSIYQFLIVVGRSGTEMLTNEAGEVTSHLQGMFSRTIRLLEAGIKPAYVFDGKPPDLKKQELAKRYSKRADATEDLAAAIETGDKEDIEKFSKRTVKVTKQHNDDCKKLLRLMGVPVIEAPSEAEAECAALCKSGKVYAVASEDMDSLTFGAPKFLRHLMDPSSRKIPVMEFEVAKILEELNLSMDQFIDLCILCGCDYCDSIRGIGGQTALKLIRQHGSIENILENINKERYQIPEDWPYQEARQLFKEPLVSVDNEESELKWATPDEEGLITFLVNENGFNNDRVTKAIEKIKAAKTKSSQGRLESFFKPMASASVAIKRKETPEKATKETTSKKPKAGGRKKK

SEQ ID NO: 682 - DNA, 1245 bp, Aquilegia sp.
atgggtataaagggtttgacaaagttattagcagccaatgcacctaattcaatgaaagaaacaacatttgagagctattcaggtcgcgagattgccgtcgatgccagtactagcatttatcaattccttattgtggtaggaagaaatggcacccaaatgttaaccaatgatgctggtcaagtaacaagtcatttggaaggaatttttacaagaaccattcgccttttggaagctggaatgaagcctgtttatgttttcgacgggaaaccaccagacttaaagaagcaggagctggctaaacggcactcaaggaggatggatgcctctgaatatttggcagctgctattgagagcggagtgaaaaaagacattgagaagtacagcaaacgaactgtgaaggttacaaagcaacataatgatgactgcaaaaagcttttaagactcatgggagtgccagtagttgaggcttcttctgaagcagaggcggaatgtgctacactatgcaaaactggaaaggtttatgctgtggcatctgaagacatggatactcttacctttggagctcccatatttgttcgccatttgatgggtagctcaagaaaatttccaacggtgcaatatgaagttgcaaagattttaaatgaacttaacttgactatggatcagttcattgatttgtgtattctctgtgggtgtgattattgtgacggcatacgaggtattgggggacaaactgctttgaagcttgttcgtcaacatggttccatagagaatatagtggagaagattaacaaagtaaggtaccagatacctgaaaattggccataccaagaagcacggtgtatttttaaagaccctgtagtatctgtcagcgaccagaatcacgtgattgaatggactactccagacgaggaggcgctcatcaacttcctggtgaatgaaaatggctttaatcataaccgagtcactaaggctattgacaagatcaaatcagccaagtacggatcatccaatggacggttacactccattaagccatggctgagaacatcagttccccttaaaagaaaggaaaccaaatgccagcttggcactctcagttcattccgcagccctaagatgttctctctgcaagtttatatgcatttgaggccaaaggtctttggctgctcaaaccctccaactgtggaaatgggtaccaagcaccctgagccgttctccagaactccctgcttcagtgcctga

SEQ ID NO: 683 - protein, 414 aa, Aquilegia sp.
MGIKGLTKLLAANAPNSMKETTFESYSGREIAVDASTSIYQFLIVVGRNGTQMLTNDAGQVTSHLEGIFTRTIRLLEAGMKPVYVFDGKPPDLKKQELAKRHSRRMDASEYLAAAIESGVKKDIEKYSKRTVKVTKQHNDDCKKLLRLMGVPVVEASSEAEAECATLCKTGKVYAVASEDMDTLTFGAPIFVRHLMGSSRKFPTVQYEVAKILNELNLTMDQFIDLCILCGCDYCDGIRGIGGQTALKLVRQHGSIENIVEKINKVRYQIPENWPYQEARCIFKDPVVSVSDQNHVIEWTTPDEEALINFLVNENGFNHNRVTKAIDKIKSAKYGSSNGRLHSIKPWLRTSVPLKRKETKCQLGTLSSFRSPKMFSLQVYMHLRPKVFGCSNPPTVEMGTKHPEPFSRTPCFSA

SEQ ID NO: 684 - DNA, 1161 bp, Brachypodium distachyon
atgggtgtcaagggtttgacgaagctgctggcggacaacgcgcccaaggcgatgaaggagcagaagttcgagagctacttcggccgccgcattgcggtcgacgccagcatgagcatctaccagttccttattgtagttggaaggacagggatggaaacccttacaaatgaagctggtgaagtcaccagtcatttgcaaggtatgtttaaccggacaataaggttgcttgaggcaggaattaaaccagtatatgtttttgatggcaagcctcctgacatgaagaaacaagagcttgcaaagagatatgcaaagagagaggatgccaccgaagagctgaccaaggcagtggagacaggagatacggatgcaattgaaagattcagcaagagaaccgtgaaagtcactaagcagcacaatgatgactgtaagcgactattaaggctgatgggtgttcctgttgtagaggcaccttgtgaagcagaagcacaatgtgctgccctttgcataaaggacaaggtgtatgctgtcgcatcagaagatatggactcgcttacttttggagctccacggtttgttcgtcatttgatggatccaagttccaggaaaatacctatcatggaatttgaagtcgcgaaaattctagaggagcttgaattcactatggaccaattcattgacttgtgtatcctctgtggatgtgactattgtgatagcattaaaggtattgggggcctaacagctctgaagcttattcgtcaacacgggtcaatagaaggcattctggaaaatattaataaagacaaatatcaaattcctgaggactggccttatgaagaagctcggcgcttgttcaaggaacccaatgttacattggatcttcctgagctcaaatggactgcacctgatgaggagggcctcgttaattttttagtgaaagaaaacggtttcaatcaagatcgggtgacaaaggccatcgagaagattaaatcagccaagaataaatcatcccaaggaaggctcgagtcgtttttcaagccaactgttagcacatcagtaccactgaagcgaaaggaaacttcagaaaaaccaacgaacgctgctgcaagcaagaaagcaaaatcgacccgtggaaagaagaaaatagttcgatgcgcgaagtga

SEQ ID NO: 685 - protein, 386 aa, Brachypodium distachyon
MGVKGLTKLLADNAPKAMKEQKFESYFGRRIAVDASMSIYQFLIVVGRTGMETLTNEAGEVTSHLQGMFNRTIRLLEAGIKPVYVFDGKPPDMKKQELAKRYAKREDATEELTKAVETGDTDAIERFSKRTVKVTKQHNDDCKRLLRLMGVPVVEAPCEAEAQCAALCIKDKVYAVASEDMDSLTFGAPRFVRHLMDPSSRKIPIMEFEVAKILEELEFTMDQFIDLCILCGCDYCDSIKGIGGLTALKLIRQHGSIEGILENINKDKYQIPEDWPYEEARRLFKEPNVTLDLPELKWTAPDEEGLVNFLVKENGFNQDRVTKAIEKIKSAKNKSSQGRLESFFKPTVSTSVPLKRKETSEKPTNAAASKKAKSTRGKKKIVRCAK

SEQ ID NO: 686 - DNA, 1152 bp, Brassica napus
atgggtatcaagggtttaacgaagcttttagccgacaatgcgcctagcgccatgaaagagcagaagttcgagagctacttcggtcggaaaatagctgttgatgcaagcatgagcatttaccagttccttattgtggtggggagagctgggactgagatgctcaccaacgaagctggtgaagtcactagccatttgcaagggatgtttaatcgaaccattcgtcttctcgaagctggaattaagcctgtgtatgtttttgatggaaagcccccggagttaaagagacaagaactagccaaacgttactccaagagagccgatgcaactgcagatttgagtggtgcaattgaggcaggaaacaaggaggacattgagaagtacagcaaacgaactgtgaaggtgacaaagcaacacaatgacgactgcaaaagactcttgaaactcatgggggtccccgtcgttgaggccacttccgaggcagaagcgcaatgtgctgcactttgcaaagcaggaaaggtgtatggtgtggcttctgaagatatggactccttaacttttggagctcctaagtttcttcgccacctgatggatcccagctccagaaagatccctgtcatggaatttgacgttgccaagattttagaagaactgcaacttaccacggatcagttcatcgacttgtgcatattgtcaggatgtgactattgtgacagcatccgaggtatcggagggcagactgccctaaagcttattcgccagcatggttctattgagacaatactcgaaaatataaacaaagaaaggtatcagatgcccgaggaatggccatataatgaagctcgtaaactttttaaagaacctgatgtcttaactgatgaagagcagctcgatatcaagtggacctctccagatgaagagggtatagttcagtttttggtgaatgaaaatggattcaacatggatagggtaaccaaggcggtagagaaaaccaaatctgcaaagaacaagtcatcccagggaaggctggagtcatttttcaagccagtcgctagctcatccgtgcctgctaaaagaaaggaaatccctgagagtaacgccaaaggagcagcaaataagaaaactaagggaggtggtgggaggaagaagaagtaa

SEQ ID NO: 687 - protein, 383 aa, Brassica napus
MGIKGLTKLLADNAPSAMKEQKFESYFGRKIAVDASMSIYQFLIVVGRAGTEMLTNEAGEVTSHLQGMFNRTIRLLEAGIKPVYVFDGKPPELKRQELAKRYSKRADATADLSGAIEAGNKEDIEKYSKRTVKVTKQHNDDCKRLLKLMGVPVVEATSEAEAQCAALCKAGKVYGVASEDMDSLTFGAPKFLRHLMDPSSRKIPVMEFDVAKILEELQLTTDQFIDLCILSGCDYCDSIRGIGGQTALKLIRQHGSIETILENINKERYQMPEEWPYNEARKLFKEPDVLTDEEQLDIKWTSPDEEGIVQFLVNENGFNMDRVTKAVEKTKSAKNKSSQGRLESFFKPVASSSVPAKRKEIPESNAKGAANKKTKGGGGRKKK

SEQ ID NO: 688 - DNA, 1191 bp, Chlamydomonas reinhardtii
atgggaattcacgggctcaccaagctgctgggcgacaacgcgccgggctgcattaaggagaccaaatttgaaaacctattcggtcgtaaggttgcagtagatgctagtatgcacatctaccagttcatggtggtggtcgggcgtcaaggcgaccagctgctcacgaatgaggctggagaaattaccagccacctgcaaggcatgtttttccgcacggcaaagatgctggaggcgggcatcaagcccgtctacgtctttgatggcaagcccccgcagctgaagcaggaccagctggcgcagcgcacggagcgcagggcggacgccaacgaggctctggagaaggccaaggaggcgggcgaccaggaggccattgagaagtacagcaagcgctccgtccgtgtcacgcgggagcacaacgacgagtgcaagcggctgctgcggctaatgggcgtgccggtggtggaggcgcccacggaggcggaggcgcagtgcgcggagatggccaagtcggggctggtgtacgggctggccacggaggacatggacgcgctcacgttcggcgcgccgcgcgtcatccgccacctcatggcgcccagcagccagaacgtgcctgtccaggagtttgaccgggaggtggccctgcgtgagctggagctgaccgacgaccagttcattgacctgtgcatcctcatgggctgcgactactgcggcaccatccgcggcattggcgcggtgcgcgcactgcagatgatcaagaagcacggcagcattgagggcatgctcaaggagctggaccccgccaagtacccggtgccggagccattcccgcacaaggagagccatgagttctttaagaaccccgaggtcacgccatctgcggagatcccgccgctcaagtggacggcgccggatgaggaggggctcgtgcagttcctggtgaacgagaagcagttcaacgagcagcgcgtgcgcaacgcggtggggcgaatcaaggccaacaagaccaaggccaaccagggccgcctcgagtccttctttacctcgctgcccaagcccgccacagcggacaaggccaagcccaaggaggacgacaagaagcggaaagcgggcgcagcggcgggcggcaaggacgccaagggcggcgcggcggccaagaaaggaaagttcggcgtgggtggcggcaagaagtga

SEQ ID NO: 689 - protein, 396 aa, Chlamydomonas reinhardtii
MGIHGLTKLLGDNAPGCIKETKFENLFGRKVAVDASMHIYQFMVVVGRQGDQLLTNEAGEITSHLQGMFFRTAKMLEAGIKPVYVFDGKPPQLKQDQLAQRTERRADANEALEKAKEAGDQEAIEKYSKRSVRVTREHNDECKRLLRLMGVPVVEAPTEAEAQCAEMAKSGLVYGLATEDMDALTFGAPRVIRHLMAPSSQNVPVQEFDREVALRELELTDDQFIDLCILMGCDYCGTIRGIGAVRALQMIKKHGSIEGMLKELDPAKYPVPEPFPHKESHEFFKNPEVTPSAEIPPLKWTAPDEEGLVQFLVNEKQFNEQRVRNAVGRIKANKTKANQGRLESFFTSLPKPATADKAKPKEDDKKRKAGAAAGGKDAKGGAAAKKGKFGVGGGKK

SEQ ID NO: 690 - DNA, 1155 bp, Chlorella vulgaris
atggggatcaagaatctgacgaaattgctgggtgatcatgctccgggatgctgtaaggagcagaaggtcgaaaactattttggccgaaaagtagctgttgatgcgtccatgcacatctaccaatttctggttgtggtgggaaggactggcgaccaaaccctgaccagcgaatcaggcgatgtcaccagtcacctgcagggaatgttcttcaggacagcaaaaatgttggaagtcggcatgaagccagtgtatgtctttgatgggaagccaccggccttgaaaaaggaggagctgtctaggagggtggagaggaggggtgatgcaacggatttgctcacagaagccaaggagactggtgcagatgcagacattgagaaatacagcaagaggacagtgagagtgacgccgcagcacaatgaggaatgccgcagactgctgcgcctgatgggagtgcctgtcgtggaagcaccttcagaagcagaggcgcagtgcgcgcagatgtgcaaggaagggctggtgtacgggattgcatcagaagacatggattcattgacatttgcaactcccaagctcatacggaatctcatgaagcctcagacgcagaatgtgccaatcaacgaatacgattatgacaaggtgcttgagggcttgaatctgaccagcgatcagtttgtggacctgtgcattctgtgtggatgcgactactgtggcacgatcaagggcattggaggcgtgactgctctgaagctcatccagaagcacaagcggctggaggatgtgctggccagcatggagggcggccgctacgagattccagaccccttccccttcgaggaagcacgccgcctgttcaaggagccggatgtcctgaagggagacagcatgcctcaactgaagtggacaacggctgatgaggagggcctggtgcagtttctggttggggacaagagcttcaacgaggacagagtcaggaaagcggtgcagcgcgtgaatgcggcaaagtcaaagtccacacaaggacgattggagagcttcttcggccccgtaagcatcaagacttccgacacagggaagcgcaaggaaccagccacaggaaagggcaagggtcaagcggcgaagaagggcaagtcaggtgtgggcgtcaagaagaagtga

SEQ ID NO: 691 - protein, 384 aa, Chlorella vulgaris
MGIKNLTKLLGDHAPGCCKEQKVENYFGRKVAVDASMHIYQFLVVVGRTGDQTLTSESGDVTSHLQGMFFRTAKMLEVGMKPVYVFDGKPPALKKEELSRRVERRGDATDLLTEAKETGADADIEKYSKRTVRVTPQHNEECRRLLRLMGVPVVEAPSEAEAQCAQMCKEGLVYGIASEDMDSLTFATPKLIRNLMKPQTQNVPINEYDYDKVLEGLNLTSDQFVDLCILCGCDYCGTIKGIGGVTALKLIQKHKRLEDVLASMEGGRYEIPDPFPFEEARRLFKEPDVLKGDSMPQLKWTTADEEGLVQFLVGDKSFNEDRVRKAVQRVNAAKSKSTQGRLESFFGPVSIKTSDTGKRKEPATGKGKGQAAKKGKSGVGVKKK

SEQ ID NO: 692 - DNA, 1170 bp, Chlorella sp.
atgggcatccagggcctcaccaagctgctgggtgatgctgccccagggtgcatgaaggagcagaagtttgaaaactactttggacgcaagattgcggtggacgcatccatgcacatctacgccttcctggtagtggtgggccgccagggcgaccagatgctgacgagtgagacgggcgaggtgaccagccacctgcagggcatgttcttccgcacagtgcgcatgctggaggcggggatgaagcctgtgtttgtgtttgagggcaaggctccggagctgaagcgcgaggagctggccaagcgcagcaaccggcgtgaggacgccaacaccgagctggaggcggcaaaggaggcgggaaacgcggaggatgtagagaagtacagcaagcgaacggtgcgcgtgacgcgggaacacaacgaggagtgcaagcgcctgctgcgcctcatgggtgtgccggtgctggaggcgccaagcgaggcagaggcgcagtgcgcacagctgtgcaaggacgggctggtgtatggcatctctaccgaggacatggattccctcacctttggcacccccaagctcatccgccacctcatggcaccctccagccagaagcctctggccatggagtttgaccacgaactggtgctcaaggagctggagctgaccgaggatcagttcatcgacctgtgcatcttatgcggttgcgactacacagccaagatcagcggcatcggcgcggtgcgcgcgctgagcctgatcaagaagcacggcagcattgagggggtgctggcggcgctggactccaagaagtatcagataccggagcccttcccctaccaggaggcgcgccgcctgttcaaggagccggacgtggtcaagggcgaccagatcccgcaactcaagtggacctcgcccgacacagagggcctgatcgacttcctggtgaaggaaaagacatttgcggaggaccgcatccgcaaggcggtagaacgcatcaatgcggctaagggcaaggccagccagggccggttagagagcttcttcggccccgccaaggtggtcagcagcacgatgggcaagcgcaaggaggtgcccgtggcggccaagggcaagaagggcagcagcggcgcggctcccaagaagggcaagctgggcggcatgggcaagaagaagtag

SEQ ID NO: 693 - protein, 389 aa, Chlorella sp.
MGIQGLTKLLGDAAPGCMKEQKFENYFGRKIAVDASMHIYAFLVVVGRQGDQMLTSETGEVTSHLQGMFFRTVRMLEAGMKPVFVFEGKAPELKREELAKRSNRREDANTELEAAKEAGNAEDVEKYSKRTVRVTREHNEECKRLLRLMGVPVLEAPSEAEAQCAQLCKDGLVYGISTEDMDSLTFGTPKLIRHLMAPSSQKPLAMEFDHELVLKELELTEDQFIDLCILCGCDYTAKISGIGAVRALSLIKKHGSIEGVLAALDSKKYQIPEPFPYQEARRLFKEPDVVKGDQIPQLKWTSPDTEGLIDFLVKEKTFAEDRIRKAVERINAAKGKASQGRLESFFGPAKVVSSTMGKRKEVPVAAKGKKGSSGAAPKKGKLGGMGKKK

SEQ ID NO: 694 - DNA, 1158 bp, Drosophila melanogaster
atgggaattttgggcttatctaagctcattgccgatctggcgccacaggcgattcgcgaaagtgagatgaagcattttttcggtcgcaaggtagcaatcgatgctagtatgtgcctgtaccagttcctcatcgccgtgcgctccgaaggcgcccagttggccaccgtaaatggtgatcccacgtcccacttaatgggcatgttctaccgcaccatccgattgctggacaacggaatcaagccggtatatgtcttcgacggaaagccaccagatctcaagtccggtgagctggcgaagcgcgccgagcggcgggaggaagcggagaaggcactgaaggcggccaccgatgcgggagatgatgccggtatcgaaaagtttaatcgccgattggtccgggtaacgaaggagcacgccaaagaggccaaggaactgctcacactaatgggtgtgccctatgttgatgcaccgtgcgaagcggaggcccagtgtgccgctctggtgaaagctggaaaggtttatgccaccgccacggaggatatggatgccctcacattcggatctacaaaactgttgagataccttacctacagcgaggcacgaaagatgcccgtcaaggagttcagctacgacaagctgttggaaggtctggccattaacaatcgagagttcattgatctatgtattctgctgggttgcgattactgtgagagcatcaagggtattggacccaagcgagcgatcgaactgatcaacacctatcgggatatagagactattctggataacctggactctagcaaatacaccgtgcccgagaactggaactacaaggtggcgcgggaactcttcatcgaaccggaggtagctgatgccgactccatagatctcaaatgggtcgagccggatgaggagggccttgtcaagtttctctgcggcgaccggcagttcaacgaagagcgcgttcgcaacggtgccaaaaagctgatgaaatccaagcaggcccagactcaggtgagactcgatagcttctttaagacactgcccagcactccgaatgccacaaacgctgcaaaacggaaggccgaggaagcaaagaagagcgccaataacaaaaaggccaagaccagcggcggtggacgaggccggcgacccaagtag

SEQ ID NO: 695 - protein, 385 aa, Drosophila melanogaster
MGILGLSKLIADLAPQAIRESEMKHFFGRKVAIDASMCLYQFLIAVRSEGAQLATVNGDPTSHLMGMFYRTIRLLDNGIKPVYVFDGKPPDLKSGELAKRAERREEAEKALKAATDAGDDAGIEKFNRRLVRVTKEHAKEAKELLTLMGVPYVDAPCEAEAQCAALVKAGKVYATATEDMDALTFGSTKLLRYLTYSEARKMPVKEFSYDKLLEGLAINNREFIDLCILLGCDYCESIKGIGPKRAIELINTYRDIETILDNLDSSKYTVPENWNYKVARELFIEPEVADADSIDLKWVEPDEEGLVKFLCGDRQFNEERVRNGAKKLMKSKQAQTQVRLDSFFKTLPSTPNATNAAKRKAEEAKKSANNKKAKTSGGGRGRRPK

SEQ ID NO: 696 - DNA, 1149 bp, Glycine max
atgggtattaagggtttaacaaagcttttagcggacaatgccccgaagtccatgaaggagaacaaattcgagagctactttggtcgcaagatcgctattgacgctagcatgagcatttaccagttccttattgtcgtgggaagaagtggaactgaaatgctcactaatgaggctggtgaagttaccagtcatttgcaagggatgttttcgcggacaatcagacttctagaagctgggataaaacctgtatatgtttttgatgggaagccacctgatttgaagaaacaagagcttgccaaacgttactccaagagagctgaggctactgaagatttgtcagaagccttagagaccgccaataaggaagacattgaaaaattcagtaaacggacagtgaaggttacaaagcagcataatgacgactgcaaaagacttttaaggctcatgggagtgcccgttgttgaggcaccctcagaagcagaggctcagtgtgctgctctttgtaaagctggaaaggtttatggtgtggcttctgaagacatggattccttaacatttggagctcctaaatttcttcgccacctaatggatccaagctcaaaaaaaattccagtgatggaattcgaagttgcgaagattttggaggagctaaatatgaccatggaccaatttattgacttatgcattctttctggctgtgattattgtgacagcattcgagggattgggggactgacagctttgaaactcatacgtcaacatggctctattgaaaatatactggagaacctaaacaaagagaggtaccagatacccgataattggccatatcaggaggctcggcggctttttaaagaaccattggtcataactgatgaaaaggaacttgatattaagtggtcttctccagatgaagaagggttaataacatttctggtaaatgagaatggcttcaacagggatagagtgactaaggcaatagaaaaaattaaagtggcaaagaacaagtcatcacaaggccgattggaatcattttttaagccaacagcaaatccatctgtacctattaaacgcaaggaaacaccagtgaataatgctaaagaaactaacaaaaagaccaaggctggtggtggtaagaagaagaaatag

SEQ ID NO: 697 - protein, 382 aa, Glycine max
MGIKGLTKLLADNAPKSMKENKFESYFGRKIAIDASMSIYQFLIVVGRSGTEMLTNEAGEVTSHLQGMFSRTIRLLEAGIKPVYVFDGKPPDLKKQELAKRYSKRAEATEDLSEALETANKEDIEKFSKRTVKVTKQHNDDCKRLLRLMGVPVVEAPSEAEAQCAALCKAGKVYGVASEDMDSLTFGAPKFLRHLMDPSSKKIPVMEFEVAKILEELNMTMDQFIDLCILSGCDYCDSIRGIGGLTALKLIRQHGSIENILENLNKERYQIPDNWPYQEARRLFKEPLVITDEKELDIKWSSPDEEGLITFLVNENGFNRDRVTKAIEKIKVAKNKSSQGRLESFFKPTANPSVPIKRKETPVNNAKETNKKTKAGGGKKKK

SEQ ID NO: 698 - DNA, 1149 bp, Glycine max
atgggtattaagggtttaacaaagcttttggcggacaatgccccgaagtccatgaaggagaacaaattcgagagctacttcggtcgcaagatcgccattgacgctagcatgagcatttaccagttccttattgttgtgggaagaagcggaactgaaatgctcactaatgaggctggtgaagttaccagtcatttgcaagggatgttttcgcggacaatcagacttctagaagctgggataaaaccagtatatgtttttgatgggaagccaccagatttgaagaaacaagagctggccaaacgttactccaagagagctgaggctactgaagatttgtcagaagccttagagactgccaataaggaagacattgaaaaattcagtaaacgtacagtgaaggtgacaaaacagcataatgacgactgcaaaagacttttaaggctcatgggagtgcctgttgttgaggcaccctcagaagcagaggctcagtgtgctgccctttgcaaagctggaaaggtttatgctgtggcttctgaagacatggattccttaacatttggatctcctaaatttcttcgccacctaatggatccaagctcaaaaaaaattccagtgatggaattcgaagttgcaaagattttggaggagctaaatatgaccatggaccaatttattgacttatgcattctttctggctgtgattattgtgacagcattcgagggattgggggactgacagctttgaaactcatacgtcaacatggctctattgaaaatatactggagaacctaaacaaagagaggtaccagataccagataattggccatatcaggaggctcggcggctttttaaagaaccaatggtcataactgatgaaaaggaacttgatattaagtggtcttctccagatgaagaagggttaataacatttctggttaatgagaatggtttcaacagtgatagagtgactaaggcaatagaaaaaattaaagtggcaaagaacaagtcatcacaaggccgattggaatcattttttaagccaacagtaaatccatctgtacctatcaaacgcaaggaaacaccagtgaataatgctaaagaaactaacaaaaagaccaaggctggtggtggtaagaagaagaaatag

SEQ ID NO: 699 - protein, 382 aa, Glycine max
MGIKGLTKLLADNAPKSMKENKFESYFGRKIAIDASMSIYQFLIVVGRSGTEMLTNEAGEVTSHLQGMFSRTIRLLEAGIKPVYVFDGKPPDLKKQELAKRYSKRAEATEDLSEALETANKEDIEKFSKRTVKVTKQHNDDCKRLLRLMGVPVVEAPSEAEAQCAALCKAGKVYAVASEDMDSLTFGSPKFLRHLMDPSSKKIPVMEFEVAKILEELNMTMDQFIDLCILSGCDYCDSIRGIGGLTALKLIRQHGSIENILENLNKERYQIPDNWPYQEARRLFKEPMVITDEKELDIKWSSPDEEGLITFLVNENGFNSDRVTKAIEKIKVAKNKSSQGRLESFFKPTVNPSVPIKRKETPVNNAKETNKKTKAGGGKKKK

SEQ ID NO: 700 - DNA, 1143 bp, Homo sapiens
atgggaattcaaggcctggccaaactaattgctgatgtggcccccagtgccatccgggagaatgacatcaagagctactttggccgtaaggtggccattgatgcctctatgagcatttatcagttcctgattgctgttcgccagggtggggatgtgctgcagaatgaggagggtgagaccaccagccacctgatgggcatgttctaccgcaccattcgcatgatggagaacggcatcaagcccgtgtatgtctttgatggcaagccgccacagctcaagtcaggcgagctggccaaacgcagtgagcggcgggctgaggcagagaagcagctgcagcaggctcaggctgctggggccgagcaggaggtggaaaaattcactaagcggctggtgaaggtcactaagcagcacaatgatgagtgcaaacatctgctgagcctcatgggcatcccttatcttgatgcacccagtgaggcagaggccagctgtgctgccctggtgaaggctggcaaagtctatgctgcggctaccgaggacatggactgcctcaccttcggcagccctgtgctaatgcgacacctgactgccagtgaagccaaaaagctgccaatccaggaattccacctgagccggattctgcaggagctgggcctgaaccaggaacagtttgtggatctgtgcatcctgctaggcagtgactactgtgagagtatccggggtattgggcccaagcgggctgtggacctcatccagaagcacaagagcatcgaggagatcgtgcggcgacttgaccccaacaagtaccctgtgccagaaaattggctccacaaggaggctcaccagctcttcttggaacctgaggtgctggacccagagtctgtggagctgaagtggagcgagccaaatgaagaagagctgatcaagttcatgtgtggtgaaaagcagttctctgaggagcgaatccgcagtggggtcaagaggctgagtaagagccgccaaggcagcacccagggccgcctggatgatttcttcaaggtgaccggctcactctcttcagctaagcgcaaggagccagaacccaagggatccactaagaagaaggcaaagactggggcagcagggaagtttaaaaggggaaaataa

SEQ ID NO: 701 - protein, 380 aa, Homo sapiens
MGIQGLAKLIADVAPSAIRENDIKSYFGRKVAIDASMSIYQFLIAVRQGGDVLQNEEGETTSHLMGMFYRTIRMMENGIKPVYVFDGKPPQLKSGELAKRSERRAEAEKQLQQAQAAGAEQEVEKFTKRLVKVTKQHNDECKHLLSLMGIPYLDAPSEAEASCAALVKAGKVYAAATEDMDCLTFGSPVLMRHLTASEAKKLPIQEFHLSRILQELGLNQEQFVDLCILLGSDYCESIRGIGPKRAVDLIQKHKSIEEIVRRLDPNKYPVPENWLHKEAHQLFLEPEVLDPESVELKWSEPNEEELIKFMCGEKQFSEERIRSGVKRLSKSRQGSTQGRLDDFFKVTGSLSSAKRKEPEPKGSTKKKAKTGAAGKFKRGK

SEQ ID NO: 702 - DNA, 1143 bp, Hordeum vulgare
atgggagtcaagggtttgacgaagctgctggcggacaacgcgcccaagtcgatgagggagcagaagttcgagagctacttcggccgccgcatcgccgtcgacgccagcatgagcatctaccagttccttattgtagttggaaggacagggatggaaacccttacaaacgaagccggtgatgtcaccagtcatttgcaaggcatgttcagccggacaataaggttgctcgaggcaggaattaaaccagtatatgtttttgatggcaagcctcctgaaatgaagaaggacgagcttttaaaaagacacgcaaagaggaatgaagcaacagaagagctgacgaaggcagtagaggcaggagatacggatgcaattgaaaaattcagcaagaggactgtaaaggtcacgaagcagcacaatgatgattgtaagcgtctactaagactgatgggtgttcctgttgtagaggctccttgtgaagcagaatcacaatgtgctgccctttgcaagagtgacaaggtgtatgctgttgcatcagaagatatggactcacttacttttggagctccacggtttgttcgtcatttgatggatccaagttcgaggaaaatacctgtaatggaatttgaagttgcgaaaattctagaggagcttgaatttaccatggaccagttcattgacttgtgcatcctctgtggatgtgactactgtgatagcattaaaggcatcggtggtcttacagctctgaagctcattcgtcagcatgggtctatcgagggcatcctggaaaatattaataaagacaaatatcaaattcctgaggactggccttatcaagaagctcggcgcatgttcaaggaacccagtgtaacactggatattcccgagctcaaatggaccgcgcctgatgaggaggggctcgtgaattttctggtgaaagaaaacggcttcagtcaagatcgtgtgactaaggccatagagaagattaaatcggcaaagaataaatcatcccaaggaaggcttgagtcatttttcaagccaactgttagcacatcagtgccactgaagcggaaggaaacttcagagaaaccagccagtgcagctgctggcaaaaagacgaagtcaacccgtggaaggaagaaataa

SEQ ID NO: 703 - protein, 380 aa, Hordeum vulgare
MGVKGLTKLLADNAPKSMREQKFESYFGRRIAVDASMSIYQFLIVVGRTGMETLTNEAGDVTSHLQGMFSRTIRLLEAGIKPVYVFDGKPPEMKKDELLKRHAKRNEATEELTKAVEAGDTDAIEKFSKRTVKVTKQHNDDCKRLLRLMGVPVVEAPCEAESQCAALCKSDKVYAVASEDMDSLTFGAPRFVRHLMDPSSRKIPVMEFEVAKILEELEFTMDQFIDLCILCGCDYCDSIKGIGGLTALKLIRQHGSIEGILENINKDKYQIPEDWPYQEARRMFKEPSVTLDIPELKWTAPDEEGLVNFLVKENGFSQDRVTKAIEKIKSAKNKSSQGRLESFFKPTVSTSVPLKRKETSEKPASAAAGKKTKSTRGRKK

SEQ ID NO: 704 - DNA, 1155 bp, Medicago truncatula
atgggtattaagggtttaacgaagcttttagctgataatgctcccaaatcaatgaaggagaacaaattcgaatcttactttgggcgtaagattgctgttgatgctagtatgagcatttaccagtttcttattgttgtggggagaagtggaactgaaatgttgactaatgaagctggtgaagtaactagtcatttgcaaggaatgtttgcgcggacaatcagacttctagaagccgagatgaagccagtatatgtttttgatgggaagccaccggagatgaagaatcaagagctgaaaaaacgtctctcaaagagagctgaggctaccgcgggtttgacagaagctctagaggctgacaataaggaagatattgaaaaattcagtaaacggacagtgaaggtgacaaagcaacataatgacgactgcaaaagacttttgagactcatgggagtgcccgttgttgaggcaccctcagaagcagaggctcagtgtgctgcactttgcaaagctggaaaggtgtatgctgtggcttctgaagacatggattccttaacgtttggagctcctaagtttcttcgccatctaatggatcctagttcaaagaagattccagtaatggaatttgacgttgcaaagattttggaggagctagatttgaccatggaccaatttattgacttatgtatactttccggatgtgattactgtgacaacattcgaggtattggggggatgacagctctgaagctcatacgccaacacggctctattgaaaaaatactggaaaacataagcaaagagaggtaccaggtaccagatgattggccatatcaggaggctcgacgactttttaaagagccagaggtctcaactgatgatgaagtacttaatcttaagtggtctcctccagatgaagaagggttaataacatttctagtaaatgagaatgggttcaacagtgatagggtgacaaaggcaatagaaaaaattaaagcggcaaagaacaagtcatcacaaggccgattggaatcattttttaagccaactgcgaatccatctgtacctatcaaacggaaggaaactccagtgaatgatgctaaagctaaagggagtaacaagaaaactaaggtgggtggcggtaagaagaaaaaatag

SEQ ID NO: 705 - protein, 384 aa, Medicago truncatula
MGIKGLTKLLADNAPKSMKENKFESYFGRKIAVDASMSIYQFLIVVGRSGTEMLTNEAGEVTSHLQGMFARTIRLLEAEMKPVYVFDGKPPEMKNQELKKRLSKRAEATAGLTEALEADNKEDIEKFSKRTVKVTKQHNDDCKRLLRLMGVPVVEAPSEAEAQCAALCKAGKVYAVASEDMDSLTFGAPKFLRHLMDPSSKKIPVMEFDVAKILEELDLTMDQFIDLCILSGCDYCDNIRGIGGMTALKLIRQHGSIEKILENISKERYQVPDDWPYQEARRLFKEPEVSTDDEVLNLKWSPPDEEGLITFLVNENGFNSDRVTKAIEKIKAAKNKSSQGRLESFFKPTANPSVPIKRKETPVNDAKAKGSNKKTKVGGGKKKK

SEQ ID NO: 706 - DNA, 1170 bp, Ostreococcus lucimarinus
atgggaatcaagggcctgacggcgctgatgcgagacaacgcccccggggcgatcaaggagcaaaagttcgagtcctacctcgaccggcgcgtcgcgatcgacgcgtcgatgcacatttatcaattcatgatggtggtggggagacagggcgaacaacagctgacgaatgaggcgggagaggtgacgtcgcacttgcaggggatgttgaatcgaacgtgccgaatgctcgaggcgggaataaagccgatttacgtgttcgatgggaagccgccggtgatgaagggaggagagctggcgaagcgcaaggacaagcgagaagaggcggaggcggcgttgaaggcggcgagagaggcgggaaatcaagaagaggtggagaaactgtccaaaagaacggtgcgagtgagcaagcaacacagtcaagaggtgatgaaactcgcgtcgttgctcggagtgcccgtgttcgaggcgccgtgcgaagccgaggcgtcgtgcgcggcgatgtgcaaggcgggactggtgtgggcggtggcgacggaggatatggatacactcacgttcgccgcgccgcggttggcaagaaatttgatggcacccaagtctcaggacaagccggtgctggagtttgactacgacaaagttctagccggtctcgggctcacgcccgagcaattcatcgacatgtgcatcttgtgcgggtgcgactattgcgacaccattcgcgggatcggtccgaagacggcgttgaagcttatcaaagaacacggttccatcgaaaagattctcgaagagatcgacactgagaagtatcctccgcctcaggattgggattttgccggcgctcgtgagttgttcaaaaatcccgaagtcatggacacgacgggcatcgcattgagttggaaggcgccaaacgaggaaggattgattgactttttggtcaaggaaaagcaatttaacgaggaacgcgtgcgcgccgtgtgcgccaaagtcaagaaggcgcgccaaggtaaagcgtcgcaaaaccgcctcgagagcttcttcggcccgccgaccataatctccagtaccatcggcaagcgcaaggttgaagaaaagaagggtaaaaacggcaaggctggtctcgcgaacaaaaagtctaaaggcgtcagtggcttcagacgatcgaagaactga

SEQ ID NO: 707 - protein, 389 aa, Ostreococcus lucimarinus
MGIKGLTALMRDNAPGAIKEQKFESYLDRRVAIDASMHIYQFMMVVGRQGEQQLTNEAGEVTSHLQGMLNRTCRMLEAGIKPIYVFDGKPPVMKGGELAKRKDKREEAEAALKAAREAGNQEEVEKLSKRTVRVSKQHSQEVMKLASLLGVPVFEAPCEAEASCAAMCKAGLVWAVATEDMDTLTFAAPRLARNLMAPKSQDKPVLEFDYDKVLAGLGLTPEQFIDMCILCGCDYCDTIRGIGPKTALKLIKEHGSIEKILEEIDTEKYPPPQDWDFAGARELFKNPEVMDTTGIALSWKAPNEEGLIDFLVKEKQFNEERVRAVCAKVKKARQGKASQNRLESFFGPPTIISSTIGKRKVEEKKGKNGKAGLANKKSKGVSGFRRSKN

SEQ ID NO: 708 - DNA, 1176 bp, Ostreococcus sp. RCC809
atggggatcaagggcctgacgcagttgttgcaagataacgccccgggggcgatgcgagagcaaaagtttgattcgtacctcgatcgacgggtcgccgtcgacgcgtcgatgcacatctatcagtttatgattgcggtgggacgagagggcgagcgtcagctgacgagcgaggcgggagaggtgacgtcgcacctggtgggaatgatgaaccgaacggcgaggatgctggaggcggggataaaaccgatctatgtgttcgatgggaaaccgccgacgatgaagggtggggaattggcgaagcggaaggacaagagagaggaagccgaggcggcgctcaaggcggcgcgcgaggcgggagaccaagcggagattgaaaaattagcgaaacgcacggtgagagtgagcaaggaacacagtaaagaggtcatgagattggcgactttgctcggagtccccgtctacgaggctccgtgcgaggcggaggcgtcgtgcgcggccctgtgcaaagccgggttggtgtgggcggtggcgacggaggatatggatacgctcacgttcgccgcgccgcgcatggcgagaaacttgatggcgcccaagtcggcagaaaagccagtgttagaattcgactacgagaaagtgttggccggacttggactgacagctgatgaattcattgatttgtgcatcttgtgcggctgcgactacaccgacaccattcgcggtatcggtccgaagactgctttgaaactcgtaaaggagcacaaaaccatcgagaacattctcgaggcgatcgatactgaaaagcaccagccgccgaaagattggaactttcaaggtgcgcgcgaactgttcaaaaatccagaagtgatggacacgaacggcatcaaactcgcgtggaaagcgccggatgaagaaggactcgtcaagttcttggtcgaagaaaagcagttcaatgaggaccgtgtcagaggagtatgcgcgcgcgtgaaaaaggcacgtactggtaaggcttcgcaaaaccgcttggaaagcttcttcggtccaccaaaaatcatctcaagcacgattggtaagcgcaaggtggaagaaaccaagggcaagaatggtaaaggtaaggcgggtctcgcgaataagaaatctaagggtgtgagtggatacaagaaatccaagcaatga

SEQ ID NO: 709 - protein, 391 aa, Ostreococcus sp. RCC809
MGIKGLTQLLQDNAPGAMREQKFDSYLDRRVAVDASMHIYQFMIAVGREGERQLTSEAGEVTSHLVGMMNRTARMLEAGIKPIYVFDGKPPTMKGGELAKRKDKREEAEAALKAAREAGDQAEIEKLAKRTVRVSKEHSKEVMRLATLLGVPVYEAPCEAEASCAALCKAGLVWAVATEDMDTLTFAAPRMARNLMAPKSAEKPVLEFDYEKVLAGLGLTADEFIDLCILCGCDYTDTIRGIGPKTALKLVKEHKTIENILEAIDTEKHQPPKDWNFQGARELFKNPEVMDTNGIKLAWKAPDEEGLVKFLVEEKQFNEDRVRGVCARVKKARTGKASQNRLESFFGPPKIISSTIGKRKVEETKGKNGKGKAGLANKKSKGVSGYKKSKQ

SEQ ID NO: 710 - DNA, 1239 bp, Oryza sativa
atgggcatcaagggtttgacgaagctgctggcggagcacgcgccgggggcggcggtgaggaggcgggtggaggattaccgcggccgcgtcgtcgccatagacaccagcctcagcatctaccagttcctcattgtggtaggaaggaaaggaacagaagttctgaccaatgaggctggtgaagtcacaagtcatctgcagggcatgttgaaccgaactgttaggattctagaagcaggaataaaacctgtttttgtgtttgatggtgagccacctgacatgaagaaaaaggaactggcaaaaaggtctttgaagagagatggttcttccgaagatctaaatagagctattgaggttggagatgaggatttaattgaaaaatttagcaaaaggactgtaaaggtcacaaaaaagcacaatgaagactgtaagaggctgttaagcttgatgggtgtccctgtagttcaggcaccaggggaggcagaagcacagtgcgcagcactctgtgaaaatcacaaggtctttgctatagcttcggaggatatggactctctaacttttggtgctagaaggtttcttcgccatttaaccgacctgagttttaagagatctcctgtaacagaattcgaagtgtcaaaggttttggaggaacttggactcacaatggatcagttcattgatttgtgtatccttagtggctgtgactactgcgagaatattagaggtattgggggacagagagctttgaaacttattcgtcagcatggttatatagaagaagtagtgcaaaatcttagccagacaaggtatagtgtcccagaagactggccttaccaggaagttcgggcattgtttaaggaacctaacgtttgtacagatattccagacttcctgtggaccccaccagatgaggagggccttataaactttttggcagccgaaaataatttcagtcctgatcgagtagtaaagtctgtagaaaagataaaggctgctaatgataaattttcccttgggcgagggaagcttttggcaccagtagcgaacttaacaggatctacatcaactgcagggaaggaacccaaatgtatcctgggtggtccagggcaagtcatgaaggctaggtcacctctacaagtgtgcaagagctcaagcttgaacttcatacatgacaattcaaaagcgttcatgctgggcaggcgatcaggatttctcagaatatctacatatgcttccatctga

SEQ ID NO: 711 - protein, 412 aa, Oryza sativa
MGIKGLTKLLAEHAPGAAVRRRVEDYRGRVVAIDTSLSIYQFLIVVGRKGTEVLTNEAGEVTSHLQGMLNRTVRILEAGIKPVFVFDGEPPDMKKKELAKRSLKRDGSSEDLNRAIEVGDEDLIEKFSKRTVKVTKKHNEDCKRLLSLMGVPVVQAPGEAEAQCAALCENHKVFAIASEDMDSLTFGARRFLRHLTDLSFKRSPVTEFEVSKVLEELGLTMDQFIDLCILSGCDYCENIRGIGGQRALKLIRQHGYIEEVVQNLSQTRYSVPEDWPYQEVRALFKEPNVCTDIPDFLWTPPDEEGLINFLAAENNFSPDRVVKSVEKIKAANDKFSLGRGKLLAPVANLTGSTSTAGKEPKCILGGPGQVMKARSPLQVCKSSSLNFIHDNSKAFMLGRRSGFLRISTYASI

SEQ ID NO: 712 - DNA, 1143 bp, Oryza sativa
atgggcatcaagggtttgacgaagcttttggcggacaatgcgcccaaggcgatgaaggagcagaagttcgagagctacttcggccggcgcattgccgtcgacgccagcatgagcatctaccagttcctcattgtagttggaaggacggggatggaaaccctcacgaacgaggccggtgaagtcaccagtcatttgcaaggtatgttcaaccggacaataaggttgctggaggcaggaatcaagccagtatatgtttttgacggcaagcctcctgatctgaagaaacaagagctcgcaaaaaggtactcgaagagggaggatgccaccaaagaactaacagaggcagtagaggaaggagataaagacgcaattgaaaaattcagcaagagaactgtgaaggtcacgaagcagcacaatgaagaatgtaaacgactattaagacttatgggggttcctgttgtagaggcgccatgtgaagcagaagcagaatgtgctgcactttgcataaatgatatggtttatgcagttgcatcagaagatatggactctcttacttttggagctccacggtttcttcgtcatttgatggatccaagttccaagaaaattccagttatggaatttgaagtcgcgaaagttttggaggagcttgaactcactatggaccaattcattgacttgtgcatcctatctggatgtgactattgtgatagcattaaaggtattggaggtcaaacagctctgaaacttattcgtcaacatgggtccatagaaagcattctggaaaacataaataaagacagatatcagattcctgaggactggccttatcaagaagctcgacgcttgttcaaggaacccaatgttacattggatattcctgagctgaaatggaatgctcccgatgaggaaggtcttgtagagtttctggtgaaagaaaatggtttcaaccaagatagagtgacaaaggccatagagaagattaaatttgccaagaacaaatcttcccaaggaaggctcgaatccttcttcaagccagttgttagcacatcagtgcctctgaaaagaaaggacacttcagaaaaaccaaccaaagcagtcgctaacaagaaaacaaagggagccggcggaaagaagaaataa

SEQ ID NO: 713 - protein, 380 aa, Oryza sativa
MGIKGLTKLLADNAPKAMKEQKFESYFGRRIAVDASMSIYQFLIVVGRTGMETLTNEAGEVTSHLQGMFNRTIRLLEAGIKPVYVFDGKPPDLKKQELAKRYSKREDATKELTEAVEEGDKDAIEKFSKRTVKVTKQHNEECKRLLRLMGVPVVEAPCEAEAECAALCINDMVYAVASEDMDSLTFGAPRFLRHLMDPSSKKIPVMEFEVAKVLEELELTMDQFIDLCILSGCDYCDSIKGIGGQTALKLIRQHGSIESILENINKDRYQIPEDWPYQEARRLFKEPNVTLDIPELKWNAPDEEGLVEFLVKENGFNQDRVTKAIEKIKFAKNKSSQGRLESFFKPVVSTSVPLKRKDTSEKPTKAVANKKTKGAGGKKK

SEQ ID NO: 714 - DNA, 1170 bp, Ostreococcus taurii
atgggaatcaaaggtttgaccgcgttgctctcggagaacgcccccggggcgatgcgagagcaaaaattcaccagttatctcgaccgacgcgtcgccatcgacgcctcgatgcacatctatcaattcatgatcgccgtcggacgcacgggcgagcagacgctgacgaacgaggcgggagaggtgacgtcacacttacaggggatgttgatgcgcacgtcgaggatgctcgaggcggggatcaaacccgtgtacgtgttcgacgggaagccaccgacgatgaagggaggagagctggcgaaacgcaaggacaagagggaggaagccgaagcggcgctcaaagcggcgagagaggcgggtaaccaggaagaggtggagaaattatccaagagaacggtgcgagtgagcaaagaacagagcatggaggtcatgaagctcgcgcaacttttggggattcccgcgtttgaggcgccgtgcgaagccgaggcgacgtgcgccgcgatgtgcaaagctggattggtctgggccgtgggcacggaggacatggacaccttgacgttcgccgcgccgagagtggcaagaaatttgatggcgccgaaatccgccgagaaacctgtgctcgaattcgactacgaaaagaccatcgccggactcgggctcaccgcggaccagttcattgacttgtgcatcttgtgcggatgcgactataccgataccattcgaggcgtcggtccgaagactgctttgaaactcatcaaagaacatggctcgattgagaaaatcttggaggcgattgatactgagaagtatccccctccgaaggattgggagtttgccggggcgcgagaactgttcaaaaatcccgaagtgatggatgtgagcgggatcaacctctcttggaaggcgccagatgaggaaggactcgtcgaatttttggtcaaggagaaacaattccaggaggatcgcgtgagaggtgtgtgcgcgaggatcagaaaggcccggcagggcgccgcgtcgcagaaccgtttggaaagcttcttcggaccgccaaagatcatttccagcactatcggcaagcggaaggttgaagaaaccaagagcggtaagggcagcaaggctggattaaacaagaaatccaagggtgtgagcggttacaaatccaagaagacttag

SEQ ID NO: 715 - protein, 389 aa, Ostreococcus taurii
MGIKGLTALLSENAPGAMREQKFTSYLDRRVAIDASMHIYQFMIAVGRTGEQTLTNEAGEVTSHLQGMLMRTSRMLEAGIKPVYVFDGKPPTMKGGELAKRKDKREEAEAALKAAREAGNQEEVEKLSKRTVRVSKEQSMEVMKLAQLLGIPAFEAPCEAEATCAAMCKAGLVWAVGTEDMDTLTFAAPRVARNLMAPKSAEKPVLEFDYEKTIAGLGLTADQFIDLCILCGCDYTDTIRGVGPKTALKLIKEHGSIEKILEAIDTEKYPPPKDWEFAGARELFKNPEVMDVSGINLSWKAPDEEGLVEFLVKEKQFQEDRVRGVCARIRKARQGAASQNRLESFFGPPKIISSTIGKRKVEETKSGKGSKAGLNKKSKGVSGYKSKKT

SEQ ID NO: 716 - DNA, 1185 bp, Physcomitrella patens
atgggtatcaagggattaaccaagctgattgcggacaatgctcatggcgcagtgaaggaacaaaagtttgagaattattttggtcgaaaaattgccatcgatgctagcatgagcatttatcagtttctgatagtcgtagggcgcagtggaagcgaattactcacgaatgacgcgggagaagtgacgagccatctgcagggcatgttcaaccggacgattcgagtgttagaggccggccttaaacctgtttacgtatttgacggtcagcctccagatttgaagaaaagggagctcgcaaaacgttttgcaaggcgcgaggatgctgctgaagatctggtcacagccaaggagacaggaaatgaggctgatgtggagaagtacagcaagaagacagtgaaggtcactaagcaacacaatgaggattgtcgtaagctgctacgacttatgggtgttcctgttgttgaggctccatctgaggctgaagctgaatgtgcatcgctgtgcaaggcagagaaggttttcgctgtggcatcagaggatatggattcgctcacatatggatcaacacgatttttacgtcaccttatggagccaacctctcggaaactacctgttctggagtttgatattgcaaaagtcttagaaggattgggtcttaacatggatcaatttgttgacttgtgcatattatgtgggtgcgactattgtgacacgatccgaggtattggacctcaaactgcccttaaaatgatacgtcaacatggttctttggagattgttctagaaaatttaaacaaagacagatatcaagtaccagatccatggccatatcaggaagcacgacgcctttttaaagagcccttagttactccgcccgaaaaggttccagaattcaagtggactgcaccagatacagagggactacgtcaacttctagtcgaagagaacggcttcaacaatgaccgagtgatgaaggctattgagaagctcaaggtggcaaagaacaaagcatcacaaggaagattagagagtttcttcggagtaagttcctcttccagcaacaagagaaaggaggcccctgattctgaagcttctgccggaaagcaggttaaaacggctgctgctgtaaaacctgctaaagctgcttcgaagaaaggtcctgcaaaggggggcaaaaagaaataa

SEQ ID NO: 717 - protein, 394 aa, Physcomitrella patens
MGIKGLTKLIADNAHGAVKEQKFENYFGRKIAIDASMSIYQFLIVVGRSGSELLTNDAGEVTSHLQGMFNRTIRVLEAGLKPVYVFDGQPPDLKKRELAKRFARREDAAEDLVTAKETGNEADVEKYSKKTVKVTKQHNEDCRKLLRLMGVPVVEAPSEAEAECASLCKAEKVFAVASEDMDSLTYGSTRFLRHLMEPTSRKLPVLEFDIAKVLEGLGLNMDQFVDLCILCGCDYCDTIRGIGPQTALKMIRQHGSLEIVLENLNKDRYQVPDPWPYQEARRLFKEPLVTPPEKVPEFKWTAPDTEGLRQLLVEENGFNNDRVMKAIEKLKVAKNKASQGRLESFFGVSSSSSNKRKEAPDSEASAGKQVKTAAAVKPAKAASKKGPAKGGKKK

SEQ ID NO: 718 - DNA, 1143 bp, Sorghum bicolor
atgggcatcaagggtttgacgaaactgctggcggacaatgcgcccaaggcgatgaaggagcagaagttcgagagctacttcggtcgcaaaatcgccatcgacgccagcatgagcatctaccagttcctgattgtagttggaaggacaggtatggaaactctcacaaatgaagctggtgaagtcactagtcatttgcaaggaatgttcaatcggacaataaggttactggaagcgggaatcaagccagtttatgtttttgatggcaagcctcctgatatgaagaaagaagagcttgctaaaagattctcaaaaagagaagatgcaactaatgatctgaaagaggcagtagaggcaggagataaagatgcggtggaaaaattgagcaagaggactgtaaaggtcacagcgcaacataacgatgattgtaaacgactgctaagacttatgggggttcctgttgtagaggcaccttctgaagcagaagcagaatgtgcagccctctgcaaaaatgataaggtgttcgctgttgcttcagaagatatggattcccttacttttggggctccaaggttccttcgtcatttaatggatccaagttccaagaaaatacctgtgatggaatttgacgttgccaaggttttggaggagcttgaactcaccatggaccagttcattgatttgtgcatcctgtgtggatgtgactactgtgatagcatcaaaggtatcgggggacaaacagctctgaaacttattcgtcaacatgggtccatagaaagcattttagagaatcttaataaagacagatatcaaattcctgaggactggccttaccaagaagctcgacgcttgttcaaggagcctaatgttacattggatgttcctgagctgaaatggactccacctgatgaggagggtctcataagtttcctggtaaaagataatggcttcaacgaagatcgggtgacaaaggccattgagaagatcaaatctgccaagaataaatcatcgcaaggaagacttgagtcctttttcaagccagttgccaccacatcagcaccgctgaaacggaaggagacttcggataaaacaagtaaggcagctgctgcgaacaagaaaacaaaggcaggtgggaagaagaagtaa

SEQ ID NO: 719 - protein, 380 aa, Sorghum bicolor
MGIKGLTKLLADNAPKAMKEQKFESYFGRKIAIDASMSIYQFLIVVGRTGMETLTNEAGEVTSHLQGMFNRTIRLLEAGIKPVYVFDGKPPDMKKEELAKRFSKREDATNDLKEAVEAGDKDAVEKLSKRTVKVTAQHNDDCKRLLRLMGVPVVEAPSEAEAECAALCKNDKVFAVASEDMDSLTFGAPRFLRHLMDPSSKKIPVMEFDVAKVLEELELTMDQFIDLCILCGCDYCDSIKGIGGQTALKLIRQHGSIESILENLNKDRYQIPEDWPYQEARRLFKEPNVTLDVPELKWTPPDEEGLISFLVKDNGFNEDRVTKAIEKIKSAKNKSSQGRLESFFKPVATTSAPLKRKETSDKTSKAAAANKKTKAGGKKK

SEQ ID NO: 720 - DNA, 1149 bp, Saccharomyces cerevisiae
atgggtattaaaggtttgaatgcaattatatcggaacatgttccctctgctatcaggaaaagcgatatcaagagcttttttggcagaaaggttgccatcgatgcctctatgtctctatatcagtttttaattgctgtaagacagcaagacggtgggcagttgaccaatgaagccggtgaaacaacgtcacacttgatgggtatgttttataggacactgagaatgattgataacggtatcaagccttgttatgtcttcgacggcaaacctccagatttgaaatctcatgagttgacaaagcggtcttcaagaagggtggaaacagaaaaaaaactggcagaggcaacaacagaattggaaaagatgaagcaagaaagaagattggtgaaggtctcaaaagagcataatgaagaagcccaaaaattactaggactaatgggaatcccatatataatagcgccaacggaagctgaggctcaatgtgctgagttggcaaagaagggaaaggtgtatgccgcagcaagtgaagatatggacacactctgttatagaacacccttcttgttgagacatttgactttttcagaggccaagaaggaaccgattcacgaaatagatactgaattagttttgagaggactcgacttgacaatagagcagtttgttgatctttgcataatgcttggttgtgactactgtgaaagcatcagaggtgttggtccagtgacagccttaaaattgataaaaacgcatggatccatcgaaaaaatcgtggagtttattgaatctggggagtcaaacaacactaaatggaaaatcccagaagactggccttacaaacaagcaagaatgctgtttcttgaccctgaagttatagatggtaacgaaataaacttgaaatggtcgccaccaaaggagaaggaacttatcgagtatttatgtgatgataagaaattcagtgaagaaagagttaaatctggtatatcaagattgaaaaaaggcttgaaatctggcattcagggtaggttagatgggttcttccaagtggtgcctaagacaaaggaacagctggctgctgcggcgaaaagagcacaagaaaataaaaaattgaacaaaaataagaataaagtcacaaagggaagaagatga

SEQ ID NO: 721 - protein, 382 aa, Saccharomyces cerevisiae
MGIKGLNAIISEHVPSAIRKSDIKSFFGRKVAIDASMSLYQFLIAVRQQDGGQLTNEAGETTSHLMGMFYRTLRMIDNGIKPCYVFDGKPPDLKSHELTKRSSRRVETEKKLAEATTELEKMKQERRLVKVSKEHNEEAQKLLGLMGIPYIIAPTEAEAQCAELAKKGKVYAAASEDMDTLCYRTPFLLRHLTFSEAKKEPIHEIDTELVLRGLDLTIEQFVDLCIMLGCDYCESIRGVGPVTALKLIKTHGSIEKIVEFIESGESNNTKWKIPEDWPYKQARMLFLDPEVIDGNEINLKWSPPKEKELIEYLCDDKKFSEERVKSGISRLKKGLKSGIQGRLDGFFQVVPKTKEQLAAAAKRAQENKKLNKNKNKVTKGRR

SEQ ID NO: 722 - DNA, 1149 bp, Solanum lycopersicum
atgggaatcaagggtttaatgaagctgttggctgacaatgctccaagtggaatgaaggagcagaagttcgagagctatttcggccgtaaaatagccatcgacgctagtatgagcatttatcagttcctgattgtagtaggacgaagcggtacggaaatgctcactaacgaagctggggaaactactagtcatttggtcgggatgttttcgcggacgattaggcttttggaagctggaatcaagccagtttatgtttttgatggcaagccccctgatttgaagaaacaagaacttgcaaaacgttactctagaagggaagatgccacagatgacttggctaaggctacagagagtggcaacaaggaggatattgagaaattcagcaagagaacagtaaaggttacatcacaacacaatgatgactgcaaaaaacttctcagactaatgggggtacctgctgttgaggctccttctgaagcagaggctcagtgtgctgcactttgcaaggcagaaaaggtttatgctgtggcctcagaagatatggattccttaacttttggagctccaaagtttcttcgccatttaatggatcctagctccaaaaagataccagtgatggaatttgacatctccaaggtattggagggacttgaacttagtatggatcagttcatagacttgtgcattctttgtggatgtgattactgtgatagcatccgaggcatagggccccagacggctttgaagcttgtacgccaacatgggtcaatggagagcatattagagaatattaacaaagagagatatcaaatacctgatgattggccttatgaagaggctaggcggctcttcaaggaaccattagttgttacagatgatgagcaaactgaactaaaatgggctgctcctgatgaagaagggttggttaactttctggtaaaggaaaatggattcaacattgatagagttacaaaggcaatagaaaagatcaagacagccaagaacaaatcttctcaggggcggttagaatcattctttaaaccagttagcacgtctgctccagttaaaagaaaggaaacatctcacaccactgagaaaggagctgctaacaagaaatcaaaggctggtggtagtaagaagaaaaagtag

SEQ ID NO: 723 - protein, 382 aa, Solanum lycopersicum
MGIKGLMKLLADNAPSGMKEQKFESYFGRKIAIDASMSIYQFLIVVGRSGTEMLTNEAGETTSHLVGMFSRTIRLLEAGIKPVYVFDGKPPDLKKQELAKRYSRREDATDDLAKATESGNKEDIEKFSKRTVKVTSQHNDDCKKLLRLMGVPAVEAPSEAEAQCAALCKAEKVYAVASEDMDSLTFGAPKFLRHLMDPSSKKIPVMEFDISKVLEGLELSMDQFIDLCILCGCDYCDSIRGIGPQTALKLVRQHGSMESILENINKERYQIPDDWPYEEARRLFKEPLVVTDDEQTELKWAAPDEEGLVNFLVKENGFNIDRVTKAIEKIKTAKNKSSQGRLESFFKPVSTSAPVKRKETSHTTEKGAANKKSKAGGSKKKK

SEQ ID NO: 724 - DNA, 1092 bp, Selaginella moellendorffii
atgaaggagcagaagtttgagagctactttgggcggaaaatcgctgtggatgcgagtatgagtatatatcagttcttgattgttgtgggacgaactggcactgaaatgctcacgaatgaggctggagaaattacaagtcatttgcagggaatgtttactcggacagttcgcttgctggagtccgggatgaagcctgtgtatgtctttgatggaaaacctccggagctgaagaaagctgagcttgtgaaaagaggtgcgaggcgtgaagaggccactgaagggcttacggaagcgatcgagaaaggtgaagtcgcggacatagagaagtatagcaagagaacagtaaaggtcacaaagcaacacaatgaagactgtcaaaagttgctacggctcatgggaattccggtcatcgaggctccctgcgaggcagaagctgaatgtgcggccttgtgcaaagctgacaaggtagtttatgccgtggcttctgaagacatggattcccttacctttggaagtccgagattcttacggcacctcatggagccagcttctcgtaaaataccagttatggagttccagatatctacggctcttcaagagctaaacctttccatggatcagtttattgatctttgcattctttgcgggtgtgactactgcgacacgattcgcggaattggaccacagacagctttgaaacttattagacagcacagtactttagaagcagtattggagaacttgaacaaggacagataccaaattccagaatcttggccttaccaagaagcccggcggctctttaaagagcccatcgtgctgccagatgaagagcttccggagctcaaatggaatgcacccgatgaggagggattgaaaaagtttctggtagaagagaatggattcaatatcgatcgcgtgacaaaggcaatcgagaggatcaagagcgccaagaacaagtcctcccagggaaggatggagtcatttttcaagcccgttgcgtcgtcctcgccagcagccgctgctacaaagagaaaggtgagtggagtgattgtggcgtggcgtgcgcaagttaaaagctccgtattgtaa

SEQ ID NO: 725 - protein, 363 aa, Selaginella moellendorffii
MKEQKFESYFGRKIAVDASMSIYQFLIVVGRTGTEMLTNEAGEITSHLQGMFTRTVRLLESGMKPVYVFDGKPPELKKAELVKRGARREEATEGLTEAIEKGEVADIEKYSKRTVKVTKQHNEDCQKLLRLMGIPVIEAPCEAEAECAALCKADKVVYAVASEDMDSLTFGSPRFLRHLMEPASRKIPVMEFQISTALQELNLSMDQFIDLCILCGCDYCDTIRGIGPQTALKLIRQHSTLEAVLENLNKDRYQIPESWPYQEARRLFKEPIVLPDEELPELKWNAPDEEGLKKFLVEENGFNIDRVTKAIERIKSAKNKSSQGRMESFFKPVASSSPAAAATKRKVSGVIVAWRAQVKSSVL

SEQ ID NO: 726 - DNA, 1149 bp, Solanum tuberosum
atgggaattaagggtttaatgaagctgttggctgataatgctccaagtggaatgaaggagcagaaattcgagagttatttcggtcgtaaaatagcaatcgatgctagtatgagcatttaccagttcctgattgtagtaggacgaagcggtacggaaatgctcactaacgaagctggggaaactactagtcatttggttgggatgttttcgcggacgattaggcttctggaagctggaatcaagcctgtttatgtttttgatggtaaaccccctgatttgaagaagcaagaacttgcaaaacgttactctagaagggaagatgccacagatgacttggctaaggctacagagagtggcaacaaggaggatattgagaaattcagcaagagaacagtaaaggttacgccacaacacaatgatgactgcaaaaagcttctcagactaatgggggtacctgctgttgaggctccttctgaagcagaggcccagtgtgctgcactttgcaaggcagaaaaggtttatgctgtggcctctgaagatatggattccttaacttttggagctccaaagtttcttcgccatttaatggatcctagctccaaaaagataccagtgatggaatttgatatctccaaggtattggagggacttgaacttagtatggatcagttcatagacttgtgcattctttgtggatgtgattactgtgatagcatccgaggcatagggccccagacggctttgaagcttgtacgccaacatgggtcaatggagagcatattagagaatattaacaaagagagatatcaaatacctgatgattggccttatgaagaggctaggcggctcttcaaggaaccattagttgttacagatgatgagcaaactgatctaaaatgggctgctcctgatgaagaagggttggttaactttctggtaaaggaaaatggattcaacattgatagagttacaaaggcaatagaaaagatcaagacagccaagaacaaatcttctcaggggcggttagaatcattctttaaaccagttagcacatctgctccagttaaaagaaaggaaacagctcacaccactgagaaaggagctgctaacaagaaatcaaaggctagtggtagtaagaagaaaaagtag

SEQ ID NO: 727 - protein, 382 aa, Solanum tuberosum
MGIKGLMKLLADNAPSGMKEQKFESYFGRKIAIDASMSIYQFLIVVGRSGTEMLTNEAGETTSHLVGMFSRTIRLLEAGIKPVYVFDGKPPDLKKQELAKRYSRREDATDDLAKATESGNKEDIEKFSKRTVKVTPQHNDDCKKLLRLMGVPAVEAPSEAEAQCAALCKAEKVYAVASEDMDSLTFGAPKFLRHLMDPSSKKIPVMEFDISKVLEGLELSMDQFIDLCILCGCDYCDSIRGIGPQTALKLVRQHGSMESILENINKERYQIPDDWPYEEARRLFKEPLVVTDDEQTDLKWAAPDEEGLVNFLVKENGFNIDRVTKAIEKIKTAKNKSSQGRLESFFKPVSTSAPVKRKETAHTTEKGAANKKSKASGSKKKK

SEQ ID NO: 728 - DNA, 1143 bp, Triticum aestivum
atgggagtgaagggtttgacgaagctactggcggacaacgcgcccaagtcgatgagggagcagaagttcgagagctacttcggccgccgcatcgccgtcgacgccagcatgtgcatctaccagttcctcattgtagttggaaggacagcgatggaaacccttacaaacgaagccggtgatatcaccagtcatttgcaaggcatgttcagccggacaataaggttgctcgaggcaggaattaaaccagtatatgtttttgatggcaagcctcctgaaatgaagaaggacgagcttttaaaaagacacgcaaagaggaatgaagcaacagaagagctgacgaaggcagtagaggcaggagatacggatgcaattgaaaaattcagcaagagaactgtaaaggtcacgaagcagcacaatgatgattgtaagcgtctactaagactgatgggtgttcctgttgtggaggctccttgtgaagcagaatcacaatgtgctgccctttgcaagaatgacaaggtgtatgctgttgcatccgaagatatggactcacttacttttggagctacacggtttgttcgtcatttgatggatccaagttccaggaaaatacctgttatggaatttgaagttgcgaaaattcttgaggagcttgaattcactatggaccaattcattgacttgtgcatcctctgtggatgtgactactgtgatagcattaaaggcattggtggtcttacagctctgaagctcattcgtcagcacgggtccattgagggcattctggaaaatattaataaagacaaatatcaaattcctgaggactggccttatcaagaggctcggcgcatgttcaaggaacccgatgtaacactggatattcccgagctcaaatggactgcacctgatgaggagggcctcgtgaactttctggtgaaagaaaatggtttcaatcaagatcgtgtgacaaaggccatagagaagattaaatcagcgaagaataaatcatcccaaggaaggctcgagtcatttttcaagccaactgttagcacatcagtgccattgaagcggaaggaaactgcagagaaaccagccagtgcagccgctagcaagaagacgaagtcaacccgcggaaggaagaaataa

SEQ ID NO: 729 - protein, 380 aa, Triticum aestivum
MGVKGLTKLLADNAPKSMREQKFESYFGRRIAVDASMCIYQFLIVVGRTAMETLTNEAGDITSHLQGMFSRTIRLLEAGIKPVYVFDGKPPEMKKDELLKRHAKRNEATEELTKAVEAGDTDAIEKFSKRTVKVTKQHNDDCKRLLRLMGVPVVEAPCEAESQCAALCKNDKVYAVASEDMDSLTFGATRFVRHLMDPSSRKIPVMEFEVAKILEELEFTMDQFIDLCILCGCDYCDSIKGIGGLTALKLIRQHGSIEGILENINKDKYQIPEDWPYQEARRMFKEPDVTLDIPELKWTAPDEEGLVNFLVKENGFNQDRVTKAIEKIKSAKNKSSQGRLESFFKPTVSTSVPLKRKETAEKPASAAASKKTKSTRGRKK

SEQ ID NO: 730 - DNA, 1173 bp, Thalassiosira pseudonana
atgggaatcaaaggcctagccaagctcctctccgacgaggcccccctctccctcaaagaagtccccctctcccacctccacgggcgcaaactagccatcgacgcctccatggccatctaccaattcctcatcgccgtccgatccggagggcccggcggccaaaacgccgccatgatgctcaccaatgccgatggagagacgacctctcatattcaggggatattcaatcgcaccattcgctttatcagtgagggcattcggccggtgtatgtgttcgacgggaagcctccgcagttcaagagcggagagttgttgaagaggagggagaagcggttgaaggccgagcaggcactcaaggctgcggaggagagtgggaacatcgaagagcaggacaaacagtcgaagcggttggtgcgagcggggacgaaagagaatgaagactgtatcaaattattgacgttgatgggtgttcccgtgattcgggctccgtgcgaggcagaagctcaggcggcagcattggcgcggagtgggaaggtgtatgccgctgccacggaggatatggacgcgttgacgtttcgtagcccggtgatggttcgtaagatgacatttgcaaatgcgtccaagagtgatgtgcagcagattttttatgacaaggccatcgaggggttggagataacgcatgatcagtttgtggatttgtgtattctcctcggttgtgattattgtgatactatcaagggaattggaccaaagactgcgttgaagttgataagggagcacaagaatattgagacaatattgaagcatttgaatagggagaagtacgtagttcctgacatctacgtcgaagcccgccgtctatttaaccaccacgaagtcttacccgacaacgaaatcgaactcaaatggacagaatgccaacccgaaccactcaaatccttcctcgtggacgaaatgggcttcaaccccgatcgtgtccaggcgagtattgaaaagttgcaaaaggcattcaaggcgagtgccaagcctcagagtaggatggattcgtttttcaaggtcaaggcaaatcccgagggtgataagaagaaggccgagaagagaaaggcggaactggcagcttccaggggaaaggggaagaagggcaagggaggtgggggattcaaaaaaaagtag

SEQ ID NO: 731 - protein, 390 aa, Thalassiosira pseudonana
MGIKGLAKLLSDEAPLSLKEVPLSHLHGRKLAIDASMAIYQFLIAVRSGGPGGQNAAMMLTNADGETTSHIQGIFNRTIRFISEGIRPVYVFDGKPPQFKSGELLKRREKRLKAEQALKAAEESGNIEEQDKQSKRLVRAGTKENEDCIKLLTLMGVPVIRAPCEAEAQAAALARSGKVYAAATEDMDALTFRSPVMVRKMTFANASKSDVQQIFYDKAIEGLEITHDQFVDLCILLGCDYCDTIKGIGPKTALKLIREHKNIETILKHLNREKYVVPDIYVEARRLFNHHEVLPDNEIELKWTECQPEPLKSFLVDEMGFNPDRVQASIEKLQKAFKASAKPQSRMDSFFKVKANPEGDKKKAEKRKAELAASRGKGKKGKGGGGFKKK

SEQ ID NO: 732 - DNA, 1194 bp, Volvox carteri
atgggaattcacggactgaccaaactgctcggcgataatgctccgggatgcatcaaggaaacaaaatttgaaaatctttttggacgcaaggttgctgtcgatgctagtatgcatatctatcagttcatggtagtcgtcggccggcagggtgaccagctgctgacgaacgaggctggcgacatcacaagccatctacaaggaatgtttttccgaacagcaagaatgctcgaagctggcatcaagcctgtgtacgtcttcgacggcaagcccccacaactcaagcaggaccagctcgctatgcgttcggaacgcagggccgacgccaacgaggccttagagaaggctaaggaggcgggggacgcggaggctgttgagaagtacagcaagcgttcggtccgtgtcaccaaggagcacaatgaggattgcaagcgattgctgcgtctcatgggcgtgcccgttgtggaagcaccttctgaggcagaggcgcagtgtgcggagatggccaaagctggcctagtgtacgggctagcaacggaggatatggacgcgctcacgttcggcgcgccacgtgtcatccgccaccttatggcccccagtagctccaatgtcccagtgcaggaaatcgaccgcgccgtggcgctccaggagctcggcctggacgatgaccagttcatcgacatgtgcattcttatggggtgcgattactgtggcaccatccgtggcatcggggccgtgcgcgcgctgcagctcatcaagaagcacggcagcatcgaggccattctggaggagctggacaaggccaagttcccagtgccggagcctttcccatacaaggagagccacgaattcttcaaaaacccagaggtcacgccggctgccgaactgccgcagcttaaatggagcagccccgacgaggaggggctagtgcagttcctggtgaacgaaaagaattttagcgagcagcgtgttcgggcagccgtctcgcgcatcaagcagcacaagggcaaggctaaccagggccgtatggatacgttcttcacggcactgccgaagtccaacacggacagtgccgctaaaaccaaagagccgcccgctaaggaggacaagaagcggaaaggcgggcctggcgcagcgccggcggccaaaggaccggtcaagaagggcaagtttggagtcggcggtggcaagaagtaa

SEQ ID NO: 733 - protein, 397 aa, Volvox carteri
MGIHGLTKLLGDNAPGCIKETKFENLFGRKVAVDASMHIYQFMVVVGRQGDQLLTNEAGDITSHLQGMFFRTARMLEAGIKPVYVFDGKPPQLKQDQLAMRSERRADANEALEKAKEAGDAEAVEKYSKRSVRVTKEHNEDCKRLLRLMGVPVVEAPSEAEAQCAEMAKAGLVYGLATEDMDALTFGAPRVIRHLMAPSSSNVPVQEIDRAVALQELGLDDDQFIDMCILMGCDYCGTIRGIGAVRALQLIKKHGSIEAILEELDKAKFPVPEPFPYKESHEFFKNPEVTPAAELPQLKWSSPDEEGLVQFLVNEKNFSEQRVRAAVSRIKQHKGKANQGRMDTFFTALPKSNTDSAAKTKEPPAKEDKKRKGGPGAAPAAKGPVKKGKFGVGGGKK

SEQ ID NO: 734 - DNA, 1140 bp, Zea mays
atgggcatcaagggtttgacgaaactgctggcggacaatgcgcccaaggcgatgaaggagcagaagttcgagagctacttcggccgcaaaatcgccgtcgacgccagcatgagcatataccagttcctgattgtagttggaaggacaggcatggaaactctcacaaatgaagctggtgaagtcactagtcatttgcaaggaatgttcaaccggacaataagattactggaagcgggaatcaagccagtttatgtttttgatggcaagcctcctgatatgaagaaacaagagcttgctaaaagatactcaaaaagagatgatgcaaccaaagatctgactgaggcagtagaggtaggagataaagatgcgattgaaaaattgagcaagaggactgtaaaggtcacaaggcaacacaacgaagattgtaaacggctattaagacttatgggggttcctgttgtagaggcaccttctgaagcagaagcagaatgtgcagccctttgcataaacgataaggtgttcgctgttgcttcagaagatatggactcccttacttttggggctccacggttccttcgtcatttaatggatccaagttccaagaaaatacctgtgatggaatttgatgttgccaaggttttggaggagcttgaactcaccatggaccagttcattgatttgtgcatcctgtgtggatgtgactattgtgatagcatcaaaggtatcggggggcaaacagctctgaaacttattcgtcaacatgggtccatagaaagcatcttggagaatcttaataaagacagatatcaaattcctgaggactggccttaccaagaagctcgacgcttgttcaaggagcctaatgtcacattggatattcctgagctaaaatggactgcacctgatgaggagggtctcataagtttcctggtaaaagataatggtttcaacgaagatcgggtgacaaaggccatagagaagatcaaatctgccaagaataaatcgtcgcaaggaagactcgagtcctttttcaagccaactgccaccacatcagcaccgctaaaacggaaggagacttcggataaaacaagcaaggcagctgcgaacaagaaaacaaaggctggtggaaagaagaaataa

SEQ ID NO: 735 - protein, 379 aa, Zea mays
MGIKGLTKLLADNAPKAMKEQKFESYFGRKIAVDASMSIYQFLIVVGRTGMETLTNEAGEVTSHLQGMFNRTIRLLEAGIKPVYVFDGKPPDMKKQELAKRYSKRDDATKDLTEAVEVGDKDAIEKLSKRTVKVTRQHNEDCKRLLRLMGVPVVEAPSEAEAECAALCINDKVFAVASEDMDSLTFGAPRFLRHLMDPSSKKIPVMEFDVAKVLEELELTMDQFIDLCILCGCDYCDSIKGIGGQTALKLIRQHGSIESILENLNKDRYQIPEDWPYQEARRLFKEPNVTLDIPELKWTAPDEEGLISFLVKDNGFNEDRVTKAIEKIKSAKNKSSQGRLESFFKPTATTSAPLKRKETSDKTSKAAANKKTKAGGKKK

SEQ ID NO: 736 - DNA, 1734 bp, Arabidopsis thaliana
atgggcatcaaggaccttctcagattcatgaaaccttatatccttcccattcacatccagaaatacgccgggaaacgagtgggaatcgatgcttattcatggctacacaaaggagcatactcatgtagtatggagttgtgtttagacactgatgggaagaagaagctgaggtacattgattactttatgcatagagtcaaccttcttcaacactatgagatcattcctgtcgttgttctcgatggtggtaatatgccctgcaaggctgccactggtgatgaacgtcataggaagcgaaaggctaactttgacgctgcaatggtgaagctgaaggaagggaatgtcgcagcagctactgagctttttcagagagcagttagtgtaacatcatccatggctcatcaattgattcaggttctgaaatcagaaaacgtcgaatttattgtagctccctatgaggctgatgctcagctagcatacctatccagcctcgaactggaacaaggcgggattgctgctgttataaccgaagacagcgatttacttgcatatggctgcaaagctgttatctttaagatggaccgctatggtaaaggagaggaactagttctagataatgtttttcaagctgttgatcaaaagccttccttccagaattttgatcaagagctattcactgcaatgtgcgtattggcgggctgtgattttctcccctcggttcctggtgttggtatttcaagagctcatgcattcatctccaagtaccagagtgtagaactcgttttgtcatttctcaagacaaaaaaaggcaaactagttcctgatgattattccagctctttcacggaagcagtttcagtttttcagcacgcacgtgtatatgactttgacgctaagaagctcaagcacttgaaacccctctcccacaacctcctgaatttaccagttgaacaacttgagttcctgggaccagatctgtcgccatctgttgctgttgcaattgctgaaggtaatgttgatcccataaccatgaaagcttttaaccacttctcggtttctaggaaaccgttgaagacgcctgttcgatcattcaaggaacaggaaaagggaagctcctttttggtatgttctttgtctaaaagtgaggaaataatagagctcaaaaggactgcagatgaagctatgattgatccagaagctattgtgaagaagaagatgtactctaaacaagattcagatctatacaaactgcttgcgcagcctaacagggatcaagtggttacccgacccagcaatccctcacttattccggacaacaacccgttcaagattagaaaaaccgatgaaatcaatctggaaatcgcagaatacggtgtgcaagaactcgctgattcgtttgtgaccaaaagcaaagcagtggacgtggcttcttcttcaccaaactctcacgaacacgaggatcaaaaagagtgtgttacaatcgatctgtccaaacttgatgccgctggaatcaaacaggacagtgagaagaacagagtgaaagaaacatttgaaacaacagaagtagatctagctgaagttcaagatcatgtgaacatgacgacaaagagagtgcgtggaacaaaacctagaaccgagaatttcaaagtgaaaacaagctgtaaaagttcagagaacaacaagactataatcaagaagaaacacagtatattagatttcttccagcgattgtaa

SEQ ID NO: 737 - protein, 577 aa, Arabidopsis thaliana
MGIKDLLRFMKPYILPIHIQKYAGKRVGIDAYSWLHKGAYSCSMELCLDTDGKKKLRYIDYFMHRVNLLQHYEIIPVVVLDGGNMPCKAATGDERHRKRKANFDAAMVKLKEGNVAAATELFQRAVSVTSSMAHQLIQVLKSENVEFIVAPYEADAQLAYLSSLELEQGGIAAVITEDSDLLAYGCKAVIFKMDRYGKGEELVLDNVFQAVDQKPSFQNFDQELFTAMCVLAGCDFLPSVPGVGISRAHAFISKYQSVELVLSFLKTKKGKLVPDDYSSSFTEAVSVFQHARVYDFDAKKLKHLKPLSHNLLNLPVEQLEFLGPDLSPSVAVAIAEGNVDPITMKAFNHFSVSRKPLKTPVRSFKEQEKGSSFLVCSLSKSEEIIELKRTADEAMIDPEAIVKKKMYSKQDSDLYKLLAQPNRDQVVTRPSNPSLIPDNNPFKIRKTDEINLEIAEYGVQELADSFVTKSKAVDVASSSPNSHEHEDQKECVTIDLSKLDAAGIKQDSEKNRVKETFETTEVDLAEVQDHVNMTTKRVRGTKPRTENFKVKTSCKSSENNKTIIKKKHSILDFFQRL

SEQ ID NO: 738 - DNA, 2208 bp, Arabidopsis thaliana
atgggtatacaagggcttttgccgttgttgaaatcgataatggtaccgattcatatcaaggagctcgagggttgtatcgtcgccgtcgatacatattcatggctacacaaaggggctttatcttgtagccgagagctctgcaagggattacccaccaagaggcatattcaatactgtatgcatagagtgaatttacttcgccatcatggagtgaagcctatcatggtctttgatggaggtccgttaccgatgaaactagaacaagagaataagcgtgctaggtccagaaaggaaaatcttgctcgtgcattggagcatgaagcaaatggaaattcctcagctgcttatgagtgctactcaaaggccgtagatatttcaccttctattgcacatgagttgatacaggttctgaggcaggagaatgttgattacgttgttgctccttacgaagctgatgcgcagatggcattcttagctattactaagcaagttgatgcgattatcactgaggattctgatctcataccttttggctgcctaagaatcattttcaaaatggacaagtttggtcatggtgttgagtttcaagcctccaagctacccaaaaataaggatctcagtctatcaggattttcaagccaaatgcttctcgaaatgtgcatattaagtggctgcgattatttgcagtcacttccaggaatgggactcaaaagagcacatgcactcattacaaaattcaaaagctatgacagggtaattaagcacttaaagtacagcacagtttcagttcctcctctttatgaagagtcattcaagagagctttactgactttcaagcatcaacgtgtctatgacccaaatgctgaagatatcatacacttgtgtgacatttctgacaaccttggtgaagattcagattttgtaggcccatcgatgccacaagatattgctaagggtatagctctaggccagcttgatcccttcacacagttgccattccaggctgagagtgttactcctaaattggctgttgatgatatatcccgtcccaaaagtttcaaacctgaaactgtaaagaaaaagcttgatttgccagtccaaaaaaaccttctcaccaagtacttctgctttgcgtctgttgaggcaaaaagaaaattcaaggctcctaggatatcaccaatgtctctgaccccaactgatgagtctccaagcattcctgatgacaacacaccagatttagatgctctttcaagccagacaacaaatgaatccccggtttatagcttgggtgagaatccatgtgttagcgaagttgcagagaaaagagattcacccgatgacgatgcagtggaaaggaatcacaaggaccttcatcataaatactgcgaacgggaagtggataggccgaagtcagatagtttgaaggttatagtaagaagcaagtattttaagcagaaacaggaggacaaaagtctgaaacaatcgatcccatgtcttaatgattgctctgtgattggtcagagaaaggctgttaaaactgtgattaacatgtcaagcgcgtctaaaagagaagagagtcacagagctatagcaacaagtccatgtttacaccatgaccgaatctacaacgatcatgaagatgctaaagaagcgagtttctctgccatgaacgaggtggctgagagaacaataaacacccacaagattaaccatcagatcaatgaagaagaacagaacccatccgttgaaattccttctgcctttagtactcccgagaatgttatacctctctcttccattgctattgatagttgccatggagttgcaacagggaagaggaagcttgactcagatgaaaaccttcacaaggaaaatttgaaatccaagcacatgcgcatggatgaaactgatactgctcttaatgcagaaacaccattagaaaccgatgatgttgagaagtttggatcgaacatttcacatatagggcattactcagaaatagcagagaaatcagtggaaagatttgtctcagctatatcgtctttcaaatattctgggactggctctcgtgctagcggtctccgtgcccctctcaaagatatccgcaacacttgtccgtccaaagggttatctcttaaaccagacatcagcaagtttggctatgcgtcaagcaaccgacacatggtgacaaagtcaaggagaatgtga

SEQ ID NO: 739 - protein, 735 aa, Arabidopsis thaliana
MGIQGLLPLLKSIMVPIHIKELEGCIVAVDTYSWLHKGALSCSRELCKGLPTKRHIQYCMHRVNLLRHHGVKPIMVFDGGPLPMKLEQENKRARSRKENLARALEHEANGNSSAAYECYSKAVDISPSIAHELIQVLRQENVDYVVAPYEADAQMAFLAITKQVDAIITEDSDLIPFGCLRIIFKMDKFGHGVEFQASKLPKNKDLSLSGFSSQMLLEMCILSGCDYLQSLPGMGLKRAHALITKFKSYDRVIKHLKYSTVSVPPLYEESFKRALLTFKHQRVYDPNAEDIIHLCDISDNLGEDSDFVGPSMPQDIAKGIALGQLDPFTQLPFQAESVTPKLAVDDISRPKSFKPETVKKKLDLPVQKNLLTKYFCFASVEAKRKFKAPRISPMSLTPTDESPSIPDDNTPDLDALSSQTTNESPVYSLGENPCVSEVAEKRDSPDDDAVERNHKDLHHKYCEREVDRPKSDSLKVIVRSKYFKQKQEDKSLKQSIPCLNDCSVIGQRKAVKTVINMSSASKREESHRAIATSPCLHHDRIYNDHEDAKEASFSAMNEVAERTINTHKINHQINEEEQNPSVEIPSAFSTPENVIPLSSIAIDSCHGVATGKRKLDSDENLHKENLKSKHMRMDETDTALNAETPLETDDVEKFGSNISHIGHYSEIAEKSVERFVSAISSFKYSGTGSRASGLRAPLKDIRNTCPSKGLSLKPDISKFGYASSNRHMVTKSRRM

SEQ ID NO: 740 - DNA, 1044 bp, Chlorella vulgaris
atgggcatacaagggctccttcctctgctgaaaagcatcacaaagtctccagtccacgtccgcaggtatagtggccaaaaggcagctgtggatgcttatggctggcttcacaaagcagcttattgttgttcctatgagctttgcgagggcatctactctgacaggtttgttgcgtattgcatgcaaagggtggagaccctgcaacaggccggtgtatcaccgatcataatctttgacggaggcaggctcccaatgaagtctgctgaggaaggcaccagggccaggagccgcagcgagaatctggagaaggcacgagcgtactggcaggcagggaatacaacagctgcatatgagtcgtaccagagggccgtggacatcagccctgccactgccaaacagctcatagaggcgctgaaggcagcaaatgtggaatacatagtggctccctatgaggcagatgctcagatggcctacttggcaatcaacggcattgtgcaagtggtcatctctgaagattctgacatgctggcatatggctgtccgcgagtgtttttcaagatggacaagaacggggacggccaggaaatctgcatggcagatctcccagagtgccgcaatcccagcttgatcggcttcacacctgacatgttcttggagatgtgcatccttgctggctgcgacttcctgaaggcgctgagctccattggcatcaaaaaggcgcatggccacatcagaaagtacaagacgttcatccgggtgtgcaagagcctgcgcttctcgggggtcaaggtgccccgcgagtacgaggcagacttccagagggcgctgtggaccttccggcaccagcgcgtgtactgcccggccgcccgcgccgtggtgcacctgcgccctctgccacccgggggcctggcagatggcgtgcttgtgctggctgccctgcccagcaaggaggaggctgacctgcccttcctggggcccatgctgcctgactctgtggcgcagggcattgccacaggtggacccttgctcctcgaagtctggtag

SEQ ID NO: 741 - protein, 347 aa, Chlorella vulgaris
MGIQGLLPLLKSITKSPVHVRRYSGQKAAVDAYGWLHKAAYCCSYELCEGIYSDRFVAYCMQRVETLQQAGVSPIIIFDGGRLPMKSAEEGTRARSRSENLEKARAYWQAGNTTAAYESYQRAVDISPATAKQLIEALKAANVEYIVAPYEADAQMAYLAINGIVQVVISEDSDMLAYGCPRVFFKMDKNGDGQEICMADLPECRNPSLIGFTPDMFLEMCILAGCDFLKALSSIGIKKAHGHIRKYKTFIRVCKSLRFSGVKVPREYEADFQRALWTFRHQRVYCPAARAVVHLRPLPPGGLADGVLVLAALPSKEEADLPFLGPMLPDSVAQGIATGGPLLLEVW

SEQ ID NO: 742 - DNA, 1026 bp, Chlorella sp.
atgggaatcgcggggctcctgccacagctgcgcagcatcaccaaaaaggcccacgtctccaagtaccgcggacaaacagtggcggtcgatgcctactgcctgctgcaccgtggagcatacacctgctctcgcgagctggtggaaggcgagcctacctcccgccacgtggcctactgcatggcccgcattgagctgctgttgggggcgggcgtgacgccgctggtggtcttcgacggtggccgcctgcccaacaaggcggacgaggagcggagccgtgaacgcaaccgtgaggagaacaagtcacgtgcacgtcagctgtggcagcagggcaacaaggcggcggctatggaatgctaccagaaggccgtggacatctcaccctcccatgcaaagcagtttgtggaggcgctgaagcggcgcagtatcaaatacgtggtggcaccgtatgaagcagacgcgcagatggcctaccttgcagtcaatggttatgttgatgtggtgctgactgaagattcggacctgctatgttatggctgtcccacggtcttcttcaagatggacaagaatggggagggggaggaggtgcagctggaggaccttccgcaatgcaaggacctggctttccaaggctttgggcacgacctgtttcaggagatgtgtgtgcttgctggctgcgattttgtgagctccctgccaggcatcggcatcaagaaggcgcaccagcatctgcgtcggacccgctgcttcctcaaggtggtacgctcgctgcgctttgatggaaccaagatccctgagggttacgagcaacgtgtgcagcgtgcactgtggaccttcaagcatcagcgggtgtactgtccccggcgccacgcagtcgtgcccctgcatgagattgcggatggcgacttggcggcaggggcacgggtgccatcagcaatgcaggtacattttggtttgcccgtattctgccctggtggtgccgctcgaccttgcttttgcgcaggcgctgccgtgctgttgcaccagtag

SEQ ID NO: 743 - protein, 341 aa, Chlorella sp.
MGIAGLLPQLRSITKKAHVSKYRGQTVAVDAYCLLHRGAYTCSRELVEGEPTSRHVAYCMARIELLLGAGVTPLVVFDGGRLPNKADEERSRERNREENKSRARQLWQQGNKAAAMECYQKAVDISPSHAKQFVEALKRRSIKYVVAPYEADAQMAYLAVNGYVDVVLTEDSDLLCYGCPTVFFKMDKNGEGEEVQLEDLPQCKDLAFQGFGHDLFQEMCVLAGCDFVSSLPGIGIKKAHQHLRRTRCFLKVVRSLRFDGTKIPEGYEQRVQRALWTFKHQRVYCPRRHAVVPLHEIADGDLAAGARVPSAMQVHFGLPVFCPGGAARPCFCAGAAVLLHQ

SEQ ID NO: 744 - DNA, 2199 bp, Drosophila melanogaster
atgggcattaccggcctaattcccttcgtgggcaaggcctcctcgcagctgcatctaaaagacattcgcggcagcacagtggccgtggacacatattgctggctacacaagggagtcttcggctgtgcggagaagttggcccgcggcgaggatacggatgtttatatacaatactgcttgaagtatgtgaacatgctgctgtcctacgacatcaagcccattctggtcttcgatgggcagcacttgccggccaaggctttgaccgaaaagcggagaagggactccaggaagcagagcaaagagcgggcggcggaactccttcgattgggtcgcatcgaggaggcccgatcccatatgcgacgctgcgtggatgtcacccacgacatggcgttgcggttgatccgggaatgccggagccggaatgttgactgcattgtggcgccctacgaggccgatgcccaaatggcctggctgaatagagcagatgtggcccagtacatcatcaccgaggactcggacttaacgctttttggagccaagaacatcatattcaagctggacctcaacggcagcggcctgctggtggaggcggaaaaacttcacctggccatgggctgcacggaggagaagtaccactttgacaagttccggcgcatgtgcatcctatccggctgtgattacctggactcactgcctggcatcggactggccaaggcgtgcaaatttatactaaaaacggaacaggaagacatgcgaatagcattaaaaaagattccaagttacctcaatatgcgcaatcttgaggtagatgacgactatattgaaaacttcatgaaagcggaggccaccttcaggcacatgtttatctacaacccgctagagcgtcgcatgcagcggttgtgtgccctcgaagattatgaaactgatgagcgctactgcagcaatgctggcaccttgctggaggatagcgagcaggctttgcacttggccctaggcaacttgaaccccttctctatgaagcgactggactcttggacaccggaaaaggcatggccaacgccgaagaacgtgaaacgatccaagcacaaaagtatttggcaaacgaattttcaaagcgaaaacactcacacgccgaagaaagaaaatccgtgtgccttgttcttcaaaaaagtggattttgtgggcaaaactctaaacgaggaaatcgaagctaatcagcgactggaacaggctaaacaaacggaggccgagttgtttaacatgtacagtttcaaagccaaaaggaggagaagtccgagcagggaagattctgtagatcaagaacgtacacctcctccgtcgccggtgcacaaaagtcggcacaatccatttgccaaggaaaggactggagaagaagctaatcagcgatccccagtagtttgtgagaatgcctctttgctgcgtttgcttagtccgaaaaaggcaagtccgttggatggagaagctggtgtaaaaaaggttgattcgcttaaaagaagcatattcgccaaggaacaagttcagatccgaagtcgcttcttcgccacgcaggatgaacagacaaggcttcaaagggagcacttaagagatacggaaaatgacgatatggatgagcagaagctgagctctcactcaggccataagaaactaagactagtatgtaaagacattccagggaagaacccaataagacaacgttgtagttcacaaatcagtgacggtgaaacagatacagataccacagcctcttctcttttggaatcacaagataaaggtgttccttcgcctttagaatcccaagaagatctcaacaactctcaaccccaaataccaactgaaggcaataccaattcaacaactattcgcattaagtcactggatttacttctggaaaactctccggaacccactcaggaatccgacaggaacaataatgatgccatcattctgctatcggacgacagctgtagctcggatcagagagcatcatctacctcatcctccagccagcaacgccagaactttttgccaaccagcaaacgaagagtggggctgagtaaaccctccactgccaagaagggcactcctaaatctaggacgaatggaaaactgggtgccgtgagccagaatcaaaccaagctcagcatgtttggcttccagacgaaacctgtcctcaaatag

SEQ ID NO: 745 - protein, 732 aa, Drosophila melanogaster
MGITGLIPFVGKASSQLHLKDIRGSTVAVDTYCWLHKGVFGCAEKLARGEDTDVYIQYCLKYVNMLLSYDIKPILVFDGQHLPAKALTEKRRRDSRKQSKERAAELLRLGRIEEARSHMRRCVDVTHDMALRLIRECRSRNVDCIVAPYEADAQMAWLNRADVAQYIITEDSDLTLFGAKNIIFKLDLNGSGLLVEAEKLHLAMGCTEEKYHFDKFRRMCILSGCDYLDSLPGIGLAKACKFILKTEQEDMRIALKKIPSYLNMRNLEVDDDYIENFMKAEATFRHMFIYNPLERRMQRLCALEDYETDERYCSNAGTLLEDSEQALHLALGNLNPFSMKRLDSWTPEKAWPTPKNVKRSKHKSIWQTNFQSENTHTPKKENPCALFFKKVDFVGKTLNEEIEANQRLEQAKQTEAELFNMYSFKAKRRRSPSREDSVDQERTPPPSPVHKSRHNPFAKERTGEEANQRSPVVCENASLLRLLSPKKASPLDGEAGVKKVDSLKRSIFAKEQVQIRSRFFATQDEQTRLQREHLRDTENDDMDEQKLSSHSGHKKLRLVCKDIPGKNPIRQRCSSQISDGETDTDTTASSLLESQDKGVPSPLESQEDLNNSQPQIPTEGNTNSTTIRIKSLDLLLENSPEPTQESDRNNNDAIILLSDDSCSSDQRASSTSSSSQQRQNFLPTSKRRVGLSKPSTAKKGTPKSRTNGKLGAVSQNQTKLSMFGFQTKPVLK

SEQ ID NO: 746 - DNA, 1512 bp, Glycine max
atgggaattcaggggtttttgccgctattgaagtcgattatggttccaatccacattaaggatctgaagggttgttctgtagccgtagacacctactcttggctccacaaaggtgccctctcttgcagcaccgaactctgcaaagggatgcccactaccaggcacattgagtattgcatgcacagagtaaatttgctgcgccattttggggttaagcctattctagtgtttgatggagggcttctgccaatgaagagtgaacaagagaacaagcgtgccagggctagaaaggataatcttgcacgtgcagttgagcatgagtcagatggaaattcagctgctgcttatgagtgctaccagaaagcagttgatatttcacctcaaattgcatgtgaactaattcaggtattgaagcaggagaacttgcagtatattgttgctccttacgaggcagatgcccagatgacattcttggcaattagtggacaagttgatgcagttataactgaagactctgatcttataccatttggttgcccaagaattatctttaaaatggacaagtttggtcaaggtgttcagtttcaggattccatgctacaaaagaataaggagcttagttttgaagggttcaacagacaaatgcttcttgaaatgtgtattttgagtggctgtgattatctgcagtccttgtcaggtatgggtctcaaaagggcccatgcaagcattaaaaaatttagaagttatgacaaggttcttaagcacttgagatatagtggagtttctgtgcctcccttttatgaagagtcattcaagaaggctatacttactttccaatatcaacgggtttatgatccaattaatgaaaatattgttcatttgtctaatatatctgatgatattggtgatgagttagactttttaggcccatatccttcatttttaatttataccttaacctgggatacaaccatgccaaaagatatagcacaaagaatagcaaaaggggatcttgatccaattaccaaaatgccatttgagggagagaatcttacagccagattagcaattgtggaaactagtcaattcaaaactcattctgaaagtgcaaagaaaaagattgatttgcccgtgcagaagaatctcttaactaagggaggaatgcagggcagcattctatggttcactgggatactgcctgatgctattgatgcttcagttttgcttctcttgaagcaaaaaggaaattcagagctcctcgggtgtcacctactgctgctaatgaaacaaagaactctactgcatattgactctgagaattggggcagtgtccctcctcctaatatccatatattttttttaacatattcttccttcctttctttctttagattggatatagttctgccacaaacaattctgaatttacagagtctccatgtcatgagaagaaaagccctgaacatacagtactgcgaaagcccaggcagccaattcataaaccgtgtctag

SEQ ID NO: 747 - protein, 503 aa, Glycine max
MGIQGFLPLLKSIMVPIHIKDLKGCSVAVDTYSWLHKGALSCSTELCKGMPTTRHIEYCMHRVNLLRHFGVKPILVFDGGLLPMKSEQENKRARARKDNLARAVEHESDGNSAAAYECYQKAVDISPQIACELIQVLKQENLQYIVAPYEADAQMTFLAISGQVDAVITEDSDLIPFGCPRIIFKMDKFGQGVQFQDSMLQKNKELSFEGFNRQMLLEMCILSGCDYLQSLSGMGLKRAHASIKKFRSYDKVLKHLRYSGVSVPPFYEESFKKAILTFQYQRVYDPINENIVHLSNISDDIGDELDFLGPYPSFLIYTLTWDTTMPKDIAQRIAKGDLDPITKMPFEGENLTARLAIVETSQFKTHSESAKKKIDLPVQKNLLTKGGMQGSILWFTGILPDAIDASVLLLLKQKGNSELLGCHLLLLMKQRTLLHIDSENWGSVPPPNIHIFFLTYSSFLSFFRLDIVLPQTILNLQSLHVMRRKALNIQYCESPGSQFINRV

SEQ ID NO: 748 - DNA, 1695 bp, Glycine max
atgggcatcaaggatcttctgaggttcatgaaaccttacattgaacctgtccacatcaagaagtacgctggaaaacgcgtgggtattgatgcgtattcatggcttcacaaaggggcttattcgtgtagtatggagctttgtctggattctaatagtgaaaggaagttgcggtacattgactattttatgcatagagtgaacttgcttcgcttctataaaataactccagttgttgtttttgatggttgcaatgttccttgcaaggccgcaactgaggaagagagaaacaggcatctcaaagaagggaatgttggtgcagcttcagagctcttccagagagcagtgagtattactcccgttatggcacataagctaattcagaccctaaaatcagagaagattgagtttgttgtagctccatatgaagcagatgctcagttagcgtacatgtctcagcttggagtagaaaatggtggagttgcagcggtgatcacagaagatagtgatctaatagcatatggctgtccagctattatttttaagatggaccgtcatgggaatggtgaaagaattgagttagagaaagtgttttctgctgagtctggtagaccttcatttcggagtttcaatatgaaactcctcacaggtatgtgcgtcttagctggctgtgattttcttccatctgttcctggaattggtattgctcgagctcatgctttagtttccaagtatcggaacctagatcgtatcttgtctgttcttaagatcgagaaaggtgaccaaatgcctgaagattatgccaaatcctttcaagaggctgttgcggtttttgagcatgctcaaatatatgatgtcaattctaaagagctcaagcacatgaatcctcttccagaaaattttcttgggtcacttgatggaaaatttgatttcttgggaccagaaattcctccatcaatagtcacagcaatagctgaaggaaacttgaatccgtcaactaagaaagcctttgataagtctgaatgttctagatttcctctacagcccattgatctccaaagcattgatcaagtccggaaagctgaagttcctgcaccatctagacaggggagtagcttttcaatcatcacctctcattacaccagagaaagtaatgcagtggcaaggctttcagataaagataagtattccaatgaagcattagcacttcataaactaatcatgccattgggaaataatggaacagaggaaaagactattatatctgatttcactcctttgaagtttcctgacaacaatccattcaggataagaaaaaatgagggaacatatcagacaaaggacactgtacaaaaagtttcttttgccagcaacatgggatataccgacttatgcatgtctccagatgactttgaagaaaaggggtctgagaatctctcaaggaaaaggaaatttcagaacttttgctcagataaagttgaagccactgatgaactgttttcaggagtgactgaagtagaaaaatctgatattccatgcatggctgtggaatcccccgaaagtataaattctgatcagactaagaaaattgccgatttgaaaggaagaagtgaaagtaataagcaatccaagagaagcaacagcaagaaaacggggagtaacaacataactcttttgagtttcttttctagagtgtaa

SEQ ID NO: 749 - protein, 564 aa, Glycine max
MGIKDLLRFMKPYIEPVHIKKYAGKRVGIDAYSWLHKGAYSCSMELCLDSNSERKLRYIDYFMHRVNLLRFYKITPVVVFDGCNVPCKAATEEERNRHLKEGNVGAASELFQRAVSITPVMAHKLIQTLKSEKIEFVVAPYEADAQLAYMSQLGVENGGVAAVITEDSDLIAYGCPAIIFKMDRHGNGERIELEKVFSAESGRPSFRSFNMKLLTGMCVLAGCDFLPSVPGIGIARAHALVSKYRNLDRILSVLKIEKGDQMPEDYAKSFQEAVAVFEHAQIYDVNSKELKHMNPLPENFLGSLDGKFDFLGPEIPPSIVTAIAEGNLNPSTKKAFDKSECSRFPLQPIDLQSIDQVRKAEVPAPSRQGSSFSIITSHYTRESNAVARLSDKDKYSNEALALHKLIMPLGNNGTEEKTIISDFTPLKFPDNNPFRIRKNEGTYQTKDTVQKVSFASNMGYTDLCMSPDDFEEKGSENLSRKRKFQNFCSDKVEATDELFSGVTEVEKSDIPCMAVESPESINSDQTKKIADLKGRSESNKQSKRSNSKKTGSNNITLLSFFSRV

SEQ ID NO: 750 - DNA, 2541 bp, Homo sapiens
atggggatacagggattgctacaatttatcaaagaagcttcagaacccatccatgtgaggaagtataaagggcaggtagtagctgtggatacatattgctggcttcacaaaggagctattgcttgtgctgaaaaactagccaaaggtgaacctactgataggtatgtaggattttgtatgaaatttgtaaatatgttactatctcatgggatcaagcctattctcgtatttgatggatgtactttaccttctaaaaaggaagtagagagatctagaagagaaagacgacaagccaatcttcttaagggaaagcaacttcttcgtgaggggaaagtctcggaagctcgagagtgtttcacccggtctatcaatatcacacatgccatggcccacaaagtaattaaagctgcccggtctcagggggtagattgcctcgtggctccctatgaagctgatgcgcagttggcctatcttaacaaagcgggaattgtgcaagccataattacagaggactcggatctcctagcttttggctgtaaaaaggtaattttaaagatggaccagtttggaaatggacttgaaattgatcaagctcggctaggaatgtgcagacagcttggggatgtattcacggaagagaagtttcgttacatgtgtattctttcaggttgtgactacctgtcatcactgcgtgggattggattagcaaaggcatgcaaagtcctaagactagccaataatccagatatagtaaaggttatcaagaaaattggacattatctcaagatgaatatcacggtaccagaggattacatcaacgggtttattcgggccaacaataccttcctctatcagctagtttttgatcccatcaaaaggaaacttattcctctgaacgcctatgaagatgatgttgatcctgaaacactaagctacgctgggcaatatgttgatgattccatagctcttcaaatagcacttggaaataaagatataaatacttttgaacagatcgatgactacaatccagacactgctatgcctgcccattcaagaagtcatagttgggatgacaaaacatgtcaaaagtcagctaatgttagcagcatttggcataggaattactctcccagaccagagtcgggtactgtttcagatgccccacaattgaaggaaaatccaagtactgtgggagtggaacgagtgattagtactaaagggttaaatctcccaaggaaatcatccattgtgaaaagaccaagaagtgcagagctgtcagaagatgacctgttgagtcagtattctctttcatttacgaagaagaccaagaaaaatagctctgaaggcaataaatcattgagcttttctgaagtgtttgtgcctgacctggtaaatggacctactaacaaaaagagtgtaagcactccacctaggacgagaaataaatttgcaacatttttacaaaggaaaaatgaagaaagtggtgcagttgtggttccagggaccagaagcaggtttttttgcagttcagattctactgactgtgtatcaaacaaagtgagcatccagcctctggatgaaactgctgtcacagataaagagaacaatctgcatgaatcagagtatggagaccaagaaggcaagagactggttgacacagatgtagcacgtaattcaagtgatgacattccgaataatcatattccaggtgatcatattccagacaaggcaacagtgtttacagatgaagagtcctactcttttgagagcagcaaatttacaaggaccatttcaccacccactttgggaacactaagaagttgttttagttggtctggaggtcttggagatttttcaagaacgccgagcccctctccaagcacagcattgcagcagttccgaagaaagagcgattcccccacctctttgcctgagaataatatgtctgatgtgtcgcagttaaagagcgaggagtccagtgacgatgagtctcatcccttacgagaaggggcatgttcttcacagtcccaggaaagtggagaattctcactgcagagttcaaatgcatcaaagctttctcagtgctctagtaaggactctgattcagaggaatctgattgcaatattaagttacttgacagtcaaagtgaccagacctccaagctatgtttatctcatttctcaaaaaaagacacacctctaaggaacaaggttcctgggctatataagtccagttctgcagactctctttctacaaccaagatcaaacctctaggacctgccagagccagtgggctgagcaagaagccggcaagcatccagaagagaaagcatcataatgccgagaacaagccggggttacagatcaaactcaatgagctctggaaaaactttggatttaaaaaagattctgaaaagcttcctccttgtaagaaacccctgtccccagtcagagataacatccaactaactccagaagcggaagaggatatatttaacaaacctgaatgtggccgtgttcaaagagcaatattccagtaa

SEQ ID NO: 751 - protein, 846 aa, Homo sapiens
MGIQGLLQFIKEASEPIHVRKYKGQVVAVDTYCWLHKGAIACAEKLAKGEPTDRYVGFCMKFVNMLLSHGIKPILVFDGCTLPSKKEVERSRRERRQANLLKGKQLLREGKVSEARECFTRSINITHAMAHKVIKAARSQGVDCLVAPYEADAQLAYLNKAGIVQAIITEDSDLLAFGCKKVILKMDQFGNGLEIDQARLGMCRQLGDVFTEEKFRYMCILSGCDYLSSLRGIGLAKACKVLRLANNPDIVKVIKKIGHYLKMNITVPEDYINGFIRANNTFLYQLVFDPIKRKLIPLNAYEDDVDPETLSYAGQYVDDSIALQIALGNKDINTFEQIDDYNPDTAMPAHSRSHSWDDKTCQKSANVSSIWHRNYSPRPESGTVSDAPQLKENPSTVGVERVISTKGLNLPRKSSIVKRPRSAELSEDDLLSQYSLSFTKKTKKNSSEGNKSLSFSEVFVPDLVNGPTNKKSVSTPPRTRNKFATFLQRKNEESGAVVVPGTRSRFFCSSDSTDCVSNKVSIQPLDETAVTDKENNLHESEYGDQEGKRLVDTDVARNSSDDIPNNHIPGDHIPDKATVFTDEESYSFESSKFTRTISPPTLGTLRSCFSWSGGLGDFSRTPSPSPSTALQQFRRKSDSPTSLPENNMSDVSQLKSEESSDDESHPLREGACSSQSQESGEFSLQSSNASKLSQCSSKDSDSEESDCNIKLLDSQSDQTSKLCLSHFSKKDTPLRNKVPGLYKSSSADSLSTTKIKPLGPARASGLSKKPASIQKRKHHNAENKPGLQIKLNELWKNFGFKKDSEKLPPCKKPLSPVRDNIQLTPEAEEDIFNKPECGRVQRAIFQ

SEQ ID NO: 752 - DNA, 1842 bp, Medicago truncatula
atgggaatccatggtctgttaccgctactcaaatcaattatgattccaattcacatcaaagactttcacggctgttctgtcgccatcgacacttattcctggcttcacaaaggtgccctttcttgcagcaccgacctctgtaaaggcatacccactactaggcacattgagtattgtatgcatagagtgaatttgctgagacattatggtgttaagcctattcttgtatttgatggagggcttttaccaatgaagggtgatcaagagaacaagcgtgcccggtctagaaaagaaaatttggaacgtgcggttgaacatgaagcaaatggaaattctactgctgcctatgagtgctatcagaaagctgttgatatttcacctcagattgcacgagaacttattcaggtactgaagcaagagaatgtgcagtatgttgttgccccatatgaggcagatgcccagatgacatttttggcaattagcaaacaggttgatgcagttataaccgaagactctgatcttataccatttggttgtccaaggattatctttaaaatggacaagtttggtcaaggtgttcagtttcagtattccatgctacaaaagaataaggagcttaattttgaagggttcaacaaacaaatgcttcttgaaatgtgtattttgagtggctgcgactatcttcagtccttgccaggcatgggtctcaaaaaggctcatgcaagcattaaaagatttaaaagctatgacaaggttcttaagcacttgaaatacaacggtgtttctgtacctcccttttacgaagagtcgttcaggaaggctattcttactttccaatatcaacgagtttatgatccagttagtgaaaatattgtccatttggctaatatacctgaggatattgatcttattcaaaataataccttaacccgatacacaccattgccaaaagatataggacaaggaatagcagaaggagatcttgatccaattaccaaaatgccatttgagggagacaaatttgctgccagattggaaattgcaggaactagtcaattcaaaacacttaattctgaaagggtgaagaaaaggattgatctgcctgtgcagaagaatctcttgaccaataatttttccttagccacgaaaggttttgcatcccttgaagcaaaaagggaattcaaagcgcctcggacgtcacctaccactgctaatcaaagtacactgatttcctcttctgtcaattccctagaacatcagacattagaagctgctgctagagaaacagtgaactctggtgcatccactgttgacactgagaattgtgacagcagccttcctcctaatagctatattgaaaacagttttcccaccaaaactttggagcttatggaatcaccgaatcatggagagaagaaaggaagtcctgatcatacaatattgagacagccgaggcagccaattcataaaccttgtttggggttgcataaggagcatgagctcacaaatgtcgaagacaaagccgaagagaaaaccaaggagacaaaaagaaaggtaattgtaaggagtcgttattttcagcagaaacaagtagaaaagaatgcttgtgacgtgaaacaagagcagctgtcctcttgcatcgtcattgatgagagaaaaaatggcatatcaggcggtgatttatgtaacaagcatttgaagaatgatgacctgaaaaagaaggtctaccctaatgacactattcaaagtgaaaatttgcaggccaggaaaatgaatcctacttcatctactcatgataatggtatatatttattagaagagaaactttgcaggcaatattag

SEQ ID NO: 753 - protein, 613 aa, Medicago truncatula
MGIHGLLPLLKSIMIPIHIKDFHGCSVAIDTYSWLHKGALSCSTDLCKGIPTTRHIEYCMHRVNLLRHYGVKPILVFDGGLLPMKGDQENKRARSRKENLERAVEHEANGNSTAAYECYQKAVDISPQIARELIQVLKQENVQYVVAPYEADAQMTFLAISKQVDAVITEDSDLIPFGCPRIIFKMDKFGQGVQFQYSMLQKNKELNFEGFNKQMLLEMCILSGCDYLQSLPGMGLKKAHASIKRFKSYDKVLKHLKYNGVSVPPFYEESFRKAILTFQYQRVYDPVSENIVHLANIPEDIDLIQNNTLTRYTPLPKDIGQGIAEGDLDPITKMPFEGDKFAARLEIAGTSQFKTLNSERVKKRIDLPVQKNLLTNNFSLATKGFASLEAKREFKAPRTSPTTANQSTLISSSVNSLEHQTLEAAARETVNSGASTVDTENCDSSLPPNSYIENSFPTKTLELMESPNHGEKKGSPDHTILRQPRQPIHKPCLGLHKEHELTNVEDKAEEKTKETKRKVIVRSRYFQQKQVEKNACDVKQEQLSSCIVIDERKNGISGGDLCNKHLKNDDLKKKVYPNDTIQSENLQARKMNPTSSTHDNGIYLLEEKLCRQY

SEQ ID NO: 754 - DNA, 993 bp, Ostreococcus lucimarinus
atgggcatcgcgtccctccttccgacgctgaaatccatctcaagacacgcgcacgtcggcgaaacgtacgcgggacaagtcgtttgcgtcgacgcctacgtctggcttcatcgcggtgcctacgcgtgctcgcgcgagctgtgcgagggattgccgacgcgcaagcacgtggaatactttttaaatcgcgcgcgaacgctgaaacgggcgaacgtgcgggcgatatacgtgttcgacggtggacgattgccggggaaggcgaacgaggaggcgcagcggagacgaaatcgaagcgaagcgctggccaaggcgaaagcgcacgcgaggcaggggaacgcgagcgcggcgaatgatttttatgtgcgagcggtggatatcacgccggagatggcgcgggaggtgatcgaggcgctggcgagggaaggattcgagagcttgacggcgccgtacgaggcggatgcgcagatggcgtacttggtgaagaatggcttcgtggcgggagtgatcacggaggatagcgatttgatcgcgcatgggtgtcggagcgtgttcacaaagatggcaggtgatggttctggcatagaaatccgcttcgaggagttggggaggaatcgcgggttgagtttcgtcgggttcacgcccgatatgtttttggaaatgtgcgtactcagcgggtgtgattatttaccgtctttgaacggcgtgggggtgaagaaggcgcacagcctgattcgaagattcaaaacttacaataaggtcttgcgtcacatgaagtttgaggggatagcggtgccgaaggattacgagtcgcgtttcgtcgacgcgttgctcacgttcaaatattcgtgggtgtattgcccgcaaaggcgagagatcgtgaacttgaacgatccagtgggggtgttggatcagagtttgattgacgacttaccgagactcatagcacatagccgcgttggcgccatcgacgagcgcgccgatcctaaggcctga

SEQ ID NO: 755 - protein, 330 aa, Ostreococcus lucimarinus
MGIASLLPTLKSISRHAHVGETYAGQVVCVDAYVWLHRGAYACSRELCEGLPTRKHVEYFLNRARTLKRANVRAIYVFDGGRLPGKANEEAQRRRNRSEALAKAKAHARQGNASAANDFYVRAVDITPEMAREVIEALAREGFESLTAPYEADAQMAYLVKNGFVAGVITEDSDLIAHGCRSVFTKMAGDGSGIEIRFEELGRNRGLSFVGFTPDMFLEMCVLSGCDYLPSLNGVGVKKAHSLIRRFKTYNKVLRHMKFEGIAVPKDYESRFVDALLTFKYSWVYCPQRREIVNLNDPVGVLDQSLIDDLPRLIAHSRVGAIDERADPKA

SEQ ID NO: 756 - DNA, 2511 bp, Oryza sativa
atggggatccagggattgctgccgcagctgaagtcgatcatggcgcccatcggggtggaggcgctcaagggccagacggtggccgtcgacacctactcctggctccacaagggcgccctctcctgcggcgaccgcctctgcaagggcctacccaccaccaggcatattgagtattgcatgcatagggttaacatgttgcggcaccatggcgtgaaaccaatccttgtatttgacggaggtcatctgccgatgaagggtgatcaagagactaaacgtgaaaggtcacgaaaggaaaatcttgagcgtgccaaggagcatgaatctgctgggaattcacgtgctgcttttgagtgttatcagaaagctgttgacattacacctaggattgcttttgaactgatccaggtattgaagcaagaaaaggttgattatattgttgcgccttatgaagcagatgcacaaatgacattcttgtctgtgaacaaacttgttgatgccgttatcacagaggattctgatctgataccatttggctgttctagaattattttcaagatggacaagtttggacaaggtgttgaatttcatattacacgattgcagcgatgcagggagcttgatcttaatggattcactatgcaaatgctactagagatgtgtattttaagtggctgtgattatcttccatcattgcctggaatgggtgtgaaacgagctcatgcacttatccaaaagctcaagggtcatgaaaaggtaatcaagcacctgaggtacagtgctgtttctgttccacctcaatatgaagaaaacttcagaaaggcgatctgggcatttcagttccaaagagtttatgaccctgtgacggaagatattgttcatttgtcaggcattccccatggcagtagtgaagacttggactttttgggcccatggctaccacagactgttgctaaaggcattgcccaagggaatatcgatccgattaccaaggaaccatttgagggcaaaacagagagtagcgcactcgcttttgataaagtgcatctgaacagagagtccagtgctccttcaaatggaaagaaaaagcttgatctacctgtccaaagaaacgtattgacaaattacttctgcttagcatcgcttgaggcaaaacggaagttcagagcacctaaggttacacctaagcaacaagtacttaatgggtctttgcccagtcccagaattgaagactctggtacccctgatttaattgaagatactagcttgccatcaaataacattcaagtttatcagtgtagttctgagcattttagctcaggaacccctctagatgattcaatcaataccgcctctcaatgtagttctgagcgtgtccgctgtgacatccctcgggatgattcagccagtgtttcaccccagtgttctcatgatattggtagtgatcctgctgaggacccagacattgaaggcaacaaggtgaaagtcaacttctgcaacagaagtacaataccgacaggctctttcttagaggggactttgcctgggatatcagatccatttttagattcacacaacacagagccatccagagctgcaccacgttatgctgaaaaaagcaatgtggtctctgccaatagaaatattactgtgaggagttcatatttcaaaacagtaaataaaagagtttgcacaaatcaaggagaagatgagtgccatgatgaagataactgcgagactggtaattacactcttcctggagatcaacaaagaagctctggaggtatattgaagagaagaaaatttagtgatccccaaaattttgaagatggaatgtttcaacccactagtcctcatgaaagtccaccggttgctgataaaggctgtgactctgattcccacgacggtatcaacacaaattctgaaggaaaatttggatgcaatgtcgcccatgtaaataaatacagtggcattgcagagaaatcaatggataagtttgctgcgctgatatcatctttcagatacgcaggctctcgtgccagtggtcttcgcgctcctttaaaggatgtgaagaacactcttcctgtcagatctgttctcagacctccagaacagagattcggttgtacggctaagaagactactagagtgcctctacaaagcagattctcaagtgatgctacaaacagcactgacgttcctgatctgagcacatttgcatacaggcctacaactgcttctgctcattctgatcaggggaagatcacaagcaaagctacagatgctgctgctggacctcctgacctgagaacatttgcttatgcaccaacaagatctaccaccagccgttttgatcagagtgaaaacacgcgcaaagctatgtgcactgcggacagccctcctgatattagcacattcgaatataaacccatgaaaagcgccgtcagacgttcagatgggagcaagttttcaggtgcagcactaaaagcagctagacgaacctctcggagctga

SEQ ID NO: 757 - protein, 836 aa, Oryza sativa
MGIQGLLPQLKSIMAPIGVEALKGQTVAVDTYSWLHKGALSCGDRLCKGLPTTRHIEYCMHRVNMLRHHGVKPILVFDGGHLPMKGDQETKRERSRKENLERAKEHESAGNSRAAFECYQKAVDITPRIAFELIQVLKQEKVDYIVAPYEADAQMTFLSVNKLVDAVITEDSDLIPFGCSRIIFKMDKFGQGVEFHITRLQRCRELDLNGFTMQMLLEMCILSGCDYLPSLPGMGVKRAHALIQKLKGHEKVIKHLRYSAVSVPPQYEENFRKAIWAFQFQRVYDPVTEDIVHLSGIPHGSSEDLDFLGPWLPQTVAKGIAQGNIDPITKEPFEGKTESSALAFDKVHLNRESSAPSNGKKKLDLPVQRNVLTNYFCLASLEAKRKFRAPKVTPKQQVLNGSLPSPRIEDSGTPDLIEDTSLPSNNIQVYQCSSEHFSSGTPLDDSINTASQCSSERVRCDIPRDDSASVSPQCSHDIGSDPAEDPDIEGNKVKVNFCNRSTIPTGSFLEGTLPGISDPFLDSHNTEPSRAAPRYAEKSNVVSANRNITVRSSYFKTVNKRVCTNQGEDECHDEDNCETGNYTLPGDQQRSSGGILKRRKFSDPQNFEDGMFQPTSPHESPPVADKGCDSDSHDGINTNSEGKFGCNVAHVNKYSGIAEKSMDKFAALISSFRYAGSRASGLRAPLKDVKNTLPVRSVLRPPEQRFGCTAKKTTRVPLQSRFSSDATNSTDVPDLSTFAYRPTTASAHSDQGKITSKATDAAAGPPDLRTFAYAPTRSTTSRFDQSENTRKAMCTADSPPDISTFEYKPMKSAVRRSDGSKFSGAALKAARRTSRS

SEQ ID NO: 758 - DNA, 945 bp, Physcomitrella patens
atggggattcaggggttgctccctaccctgaagtccatcatgaacccacggcacattcgggattatgctggaaagcgggtggccattgacacctactcctggctacacaaagccgcattcagttgcagtaaggagttatgccttgggctgcctaatgacaagtacatagactattgcatgcatcgggtcaacatgctgcggcacttcggtttgcagcccgtccttgtgtttgatgggggtggccttccaatgaagtctgatcaggaaatgaaacgtgccagatcgaggaaggagaatttggaacgtgctctggagcacgagcgcctgggaaacttcaccgctgcgatgcaatgttatcagagggccgtagacataacacctgcaatagctttcaggctgataaaggttttgcgccaggaaaacgtggagtatgtggttgcaccgtatgaagcagatgctcaaatggcttttttagctcgcaatggacacgtggatcttgtcatcactgaagattctgaccttattgcatatggttgcccgcagatatttttcaagatggacaagtatggacaaggtgtggggtttcagttctctgacattacggccaacaaagacattgacttcaacaatttctccagacaaatgattcttgaaatgtgcataatgagtggttgcgattacttgccttccttgccaggaatgggcgtaaaaaaagctcatggcttaatgaaacgttttaagacttatataaaggtaatgaagcacttgaagttcagtggcgtcctgatagatgaacaatacgagcaaggttttcggagagcaatattaacatttcagcatcatcgtgtttatgaccctgccaaaagggcaatggttcatctcaccgatgtaccaggcgaactcgttaacgatctacattttctgggaccatatcctaccttctaa

SEQ ID NO: 759 - protein, 314 aa, Physcomitrella patens
MGIQGLLPTLKSIMNPRHIRDYAGKRVAIDTYSWLHKAAFSCSKELCLGLPNDKYIDYCMHRVNMLRHFGLQPVLVFDGGGLPMKSDQEMKRARSRKENLERALEHERLGNFTAAMQCYQRAVDITPAIAFRLIKVLRQENVEYVVAPYEADAQMAFLARNGHVDLVITEDSDLIAYGCPQIFFKMDKYGQGVGFQFSDITANKDIDFNNFSRQMILEMCIMSGCDYLPSLPGMGVKKAHGLMKRFKTYIKVMKHLKFSGVLIDEQYEQGFRRAILTFQHHRVYDPAKRAMVHLTDVPGELVNDLHFLGPYPTF

SEQ ID NO: 760 - DNA, 984 bp, Physcomitrella patens
atggggatccaggggttgctgcccaccctgaagtctatcatgcaccctcgacacgcacaggagtatgctggaaagcgggccgcgattgatacttattcttggctccacaaggccgtcctcagctgcagcagggatttgtgtcatgggcgccacaatgacaagtacatagactactgcatgcgtagagtccaaatgttgcgatactacggcgtgcagcccgtcctagtgttcgatggaggtagcctccctatgaagtctgatcaggaaattaagcgtgccagatcaaggaaggagaacctggaacgtgccttggagtatgaacggttgggaaaccactccgccgcttacgaatgctaccagagggctgtggatataactcctgcaatagcattcaggctgatacaggtactgcggcaggagaatgtgcagtatgtggttgcaccatatgaagctgatgctcagttagtctttttagcactcaacagacacgtggattttgtcatcacagaagactctgatctaattgtatatggttgtccgcagatttttttcaagatggataaacatgggcaaggtgtggggtttcaaatctctgacattacggcgaataaagatatcgatctcagcgatttcacgaaacaaatgattcttgaaatgtgcataatgagcggttgcgattatttgccttctttgccaggaataggtgtgaaaagatctcatggcttaattaaacgtttcaggacctatcaaaaggcactgaagcatttggaggcgaaaggtgttcttatagatccacagtatgaacaaggtttccacagagcaattttgacgttccgacaccatcgtgtttacgatcctgtgaaaaaggagatggtgcacctcactggtgtaccgagtgaacttgacaccaacctagactttctgggaccatatcctcttgttgagattttcacaaaccggttttattacaattatgaggtttaa

SEQ ID NO: 761 - protein, 327 aa, Physcomitrella patens
MGIQGLLPTLKSIMHPRHAQEYAGKRAAIDTYSWLHKAVLSCSRDLCHGRHNDKYIDYCMRRVQMLRYYGVQPVLVFDGGSLPMKSDQEIKRARSRKENLERALEYERLGNHSAAYECYQRAVDITPAIAFRLIQVLRQENVQYVVAPYEADAQLVFLALNRHVDFVITEDSDLIVYGCPQIFFKMDKHGQGVGFQISDITANKDIDLSDFTKQMILEMCIMSGCDYLPSLPGIGVKRSHGLIKRFRTYQKALKHLEAKGVLIDPQYEQGFHRAILTFRHHRVYDPVKKEMVHLTGVPSELDTNLDFLGPYPLVEIFTNRFYYNYEV

SEQ ID NO: 762 - DNA, 2241 bp, Populus trichocarpa
atgggaatagaagggcttttacctctcttgaaatcaataatggtaccaatccatattaaggaattagagggctgttctgttgcggttgatacctattcttggcttcacaaaggtgccttgtcttgcagcactcagctttgcaaaggattacccacttccaggcacattgagtattgcatgcacagagtaaatttgctgcggcattatggtgttaagccaattttagtctttgatggaggtcttctgccaatgaagattgaacaagagaacaaacgtgcaaggacaagggaagagaaccttgtgcgtgctattgagcatgagtcaaatggaaattctgcagctgcttatgagtgctatcagaaggctgttgatatttccccttcaattgcacacgaactaatccaggtcttaaggcaggagaatgtatcatatgttgtggccccttatgaggcggatgcccaaatgaccttcttgtcggtatgcaaacaagtggatgcagttatcaccgaggactctgatctaataccttttggctgtcaccgaattattttcaaaatggacaagtatgggcaaggagttgagtttcagaattccaggcttcaacagaacaaggatataagttttgtgggtttcacaaacgaaatgcttcttgagatgtgcattttcagtggttgtgactatcaacaatcattaccaggaatgggactgaaaagggcacatgcattaattacaaagttcaaaagctatgacaaggtgatcaaacatttgagatatagcacagtgtctgttcctccactttatgaagaatcattcaagaaagcaatattgactttcaggcatcaacgtgtttatgatcctactatgaaagatattgtacatttgtctgacctgcctgacaatattggcaatgatttggaatttttgggcccattgataccgcaacagatagctacaggtatagcaagaggggatctggatccgtttactcaaatgccattccagttacagggagaaagtagcagttctgtgccggtacctaatgtaactcccaaatgcaaaaattataaactggaaagtggaaagaaaaagctagatttgcctgtccagaagaatctgctgactaagtacttctgcttttcatctctggaagcaaagagaaacttcagagcacctcagttgtcacctacaagtccaagtctagtgattcacacttcttcgagtcccagcaataatggtagtgaggaggctgcttcttgtaataccagctgctcttcagcatccttagttgtctctaagagtgacagaaacaacctccacagcaacaatgtggaaagttgttttccagatggagttcatgagtttatggagtctccaagtcctggcatggtggatgagaaggggcctcctgaaagtattttgctacaacaaattggtcattcaatgcgtggaccttgtcaagcattactaaaggagtgtaataatgagaacgctccaatttctgttgaggggaaaacaagaacagagaacaaaagggtcattgttaggagtcgtttcttccagcacaagtcaatgaacaagaatggccaagacaataaacacgaaatgatcagagtcaaggatgatgttgccagtgatacgtttgaagatagcatccttgagggatctgaaaatagaacagggaacagagagatcactataaggagctcttttttccagcacaagtcagttaatgagaatgatcaaggcaataaacaagaaaagctcttagaaagggatgattcagccaacaatatttataaagatttcattcttgagagcccttctgacaataaatgttcaaatggcatcatgatgaaaagaaagacatccccagatgacaatgttcaaagaaacatggaagtgaagcacatgcgcacagatgcatctcttcctgatgatggttgcgatcctcacctcaaggagacattagcagggacgaaacttgaggaacggaagtttggatctgacatttcacatataagccattattccaacatagcagagaaatcaatggaaagttttatttctgtgatatcttcatttagatacaactcatctggttctcgtgccagtggactgcgagcccctctgaaagacattcggaacacttgtaccaataggtcgaataatgccgttgattttagccaatttgcttacattccaaagaaccagaagaccacagtagcatctctaagacgctga

SEQ ID NO: 763 - protein, 746 aa, Populus trichocarpa
MGIEGLLPLLKSIMVPIHIKELEGCSVAVDTYSWLHKGALSCSTQLCKGLPTSRHIEYCMHRVNLLRHYGVKPILVFDGGLLPMKIEQENKRARTREENLVRAIEHESNGNSAAAYECYQKAVDISPSIAHELIQVLRQENVSYVVAPYEADAQMTFLSVCKQVDAVITEDSDLIPFGCHRIIFKMDKYGQGVEFQNSRLQQNKDISFVGFTNEMLLEMCIFSGCDYQQSLPGMGLKRAHALITKFKSYDKVIKHLRYSTVSVPPLYEESFKKAILTFRHQRVYDPTMKDIVHLSDLPDNIGNDLEFLGPLIPQQIATGIARGDLDPFTQMPFQLQGESSSSVPVPNVTPKCKNYKLESGKKKLDLPVQKNLLTKYFCFSSLEAKRNFRAPQLSPTSPSLVIHTSSSPSNNGSEEAASCNTSCSSASLVVSKSDRNNLHSNNVESCFPDGVHEFMESPSPGMVDEKGPPESILLQQIGHSMRGPCQALLKECNNENAPISVEGKTRTENKRVIVRSRFFQHKSMNKNGQDNKHEMIRVKDDVASDTFEDSILEGSENRTGNREITIRSSFFQHKSVNENDQGNKQEKLLERDDSANNIYKDFILESPSDNKCSNGIMMKRKTSPDDNVQRNMEVKHMRTDASLPDDGCDPHLKETLAGTKLEERKFGSDISHISHYSNIAEKSMESFISVISSFRYNSSGSRASGLRAPLKDIRNTCTNRSNNAVDFSQFAYIPKNQKTTVASLRR

SEQ ID NO: 764 - DNA, 558 bp, Populus trichocarpa
atgggtgtcaaagatctgctcaagttcatgaaaccctacattgaacctgttcacataaaaaaatataatggcaaacgtgtgggtattgatgcttatagttggctacataaaggagcttattcatgtagcatggagatttgtttaaattcaaatagcgaaaagaagttgcggtatttagactattttatgcacagaattaatctacttagacactacaagattacaccagttgttgtttttgatggtggaaatattccctgtaaagctggaactgaacaagacagatacaggaaaagaaaagcaaatcgtgagttggcaatggagaagctcaaagaagggaatgctaatgctgctactgaattttttcagagagcaattagcattaccccattgatggcacatcaactgattcagatcttgagatcggaaaacatagaatttttggtagctccatacgaggctgatgcacagttagcacatttagctagccttgaagcagaaagaggtggtatagcagctgttataacagaggacagtgatctattggcatatggttgc

SEQ ID NO: 765 - protein, 575 aa, Populus trichocarpa
MGVKDLLKFMKPYIEPVHIKKYNGKRVGIDAYSWLHKGAYSCSMEICLNSNSEKKLRYLDYFMHRINLLRHYKITPVVVFDGGNIPCKAGTEQDRYRKRKANRELAMEKLKEGNANAATEFFQRAISITPLMAHQLIQILRSENIEFLVAPYEADAQLAHLASLEAERGGIAAVITEDSDLLAYGCQATIFKMDRYGNGEEIVLDKVFDAAARKPSFQCFDKELFMGMCVLAGCDFLPSVPGIGISKAHSYVSKYRNLDRVLSVLKLEKGRQMPEDYSKSFIEALAVFQHARIYDSNNKRLEHMKPVPQNLLESLEGKLDFLGPEIPPSVATAIAEGNLDPTTMEAFACFRSPGRLPDPIFIQNPSQLQKPKANVVSRQMNSSMAFLSYKSEGDSVVLKQEPLSTESMYISEALALQKLISPPKVNITETAMVPNDVPLKVPKNPFRIQQVEEINLDQKDSSTGQISVVIDHEKMNIPWATPDDIQSEVHDKSPPKKRKLNKVHLDQGASITAQASVVTKAENSDNLCVAESQENVNSMPKMTSNGKGKNEKAKRSKHMSLENTKNTILNFFSRA

SEQ ID NO: 766 - DNA, 1293 bp, Saccharomyces cerevisiae
atgggaatacctggcttactgcctcaattaaagagaattcaaaaacaggtgtccctgaaaaaatacatgtatcaaacattagccattgatggttatgcgtggctacacagggcttcttgtgcgtgtgcttttgaacttgtgatgaataagccaacaaacaaatacttgcaatttttcattaaaaggctgcaactcctaaaacgccttaagatcaagccatatatagtttttgatggtgattccctttttgtgaaaaatcatacagaaactagaagaagaaagaaaaggttagaaaacgaaatgattgcaaagaaattgtggtcagccggcaacagatataatgcaatggaatattttcaaaaaagtgttgacatcacaccagaaatggcgaaatgtattattgattattgcaaactacattcaattccctacattgttgcaccatttgaagcagatccgcaaatggtttacttggaaaaaatgggccttatacagggtatcatatcagaagattctgatttgttggtctttggttgtaaaacactcataacaaagttaaatgatcagggaaaagctttagaaatctcaaaagacgatttttcagctttacctgaaaatttccctctaggagaattaagtgaacaacaatttcgtaatctagtttgtttagcagggtgtgattacactagcggaatttggaaagtgggtgtagtcactgctatgaagattgtgaaacggtattctgaaatgaaagacatccttatacaaatagaacggacagaaaaactttgtttcagtaaggcgttcaagcagcaggttgagttcgccaattatgcgtttcaataccaaagagtgttttgtcctctatcaaatcagattacaactttaaataatattcctaaagcagtcacaaattcccacgctgaaattattaaaattatgaaatgtattggttccgttgttgaaaggggatcaggggtacgaaaagatgtcattaatactaaaaatattgatcacaaagttcatgaaatgatagcaaaaggggagttgcaccctgtagatatggcttctaaacttattaatagagaaagaaaattaaaagcaagaaagctgtttaaagtaggtctacttgggggtgaatccaactcattcaataagaaagtggagcaaccgctagtggatacgcaggacgtgttatcggagagggagaattctcttgataacaaaaacgcatcctctatttatatgacctcaccagcagcgatctcaggcaccgtaccatcaattttctaa

SEQ ID NO: 767 - protein, 430 aa, Saccharomyces cerevisiae
MGIPGLLPQLKRIQKQVSLKKYMYQTLAIDGYAWLHRASCACAFELVMNKPTNKYLQFFIKRLQLLKRLKIKPYIVFDGDSLFVKNHTETRRRKKRLENEMIAKKLWSAGNRYNAMEYFQKSVDITPEMAKCIIDYCKLHSIPYIVAPFEADPQMVYLEKMGLIQGIISEDSDLLVFGCKTLITKLNDQGKALEISKDDFSALPENFPLGELSEQQFRNLVCLAGCDYTSGIWKVGVVTAMKIVKRYSEMKDILIQIERTEKLCFSKAFKQQVEFANYAFQYQRVFCPLSNQITTLNNIPKAVTNSHAEIIKIMKCIGSVVERGSGVRKDVINTKNIDHKVHEMIAKGELHPVDMASKLINRERKLKARKLFKVGLLGGESNSFNKKVEQPLVDTQDVLSERENSLDNKNASSIYMTSPAAISGTVPSIF

SEQ ID NO: 768 - DNA, 2109 bp, Saccharomyces cerevisiae
atgggtatccaaggtcttcttcctcagttaaagcccatacagaatccagtatcactacgtaggtatgaaggagaagtgttagccattgatggctatgcatggctacatagagcagcctgctcttgtgcttatgaacttgcaatgggaaaaccaactgataagtacctgcagtttttcataaaaagatttagtttattgaaaacctttaaagttgaaccgtatttggtcttcgatggtgatgccattccagttaaaaagtctactgaatctaaaagaagggataagagaaaagaaaacaaagccatagctgaaagactgtgggcctgtggcgaaaagaaaaatgctatggactattttcaaaaatgtgtcgacataacgcctgaaatggcaaaatgtatcatatgctactgtaagctaaacggtattcggtacatagtggctccgtttgaggctgactctcaaatggtatatttagaacagaaaaacattgtgcaaggaataatatccgaagattctgacctcctcgtcttcggatgtcgacgtctcattacgaagctgaatgattatggagaatgtttagaaatatgtcgcgataattttattaaactgcctaaaaagtttccgttgggatccttaactaatgaagaaatcataacaatggtttgtttatccggttgtgactatacaaatggaattcccaaggttggcctgattaccgcaatgaaattagttagaagattcaatactattgaaaggataattctgagtatacagcgggagggaaaactgatgataccagacacatacattaatgaatatgaagctgcagttttagcatttcaattccaaagggtattttgccctattcggaagaaaatagtgagcttgaatgaaattccgctgtacttgaaagataccgaaagtaaaagaaaaagactctacgcgtgcattggttttgtcatacacagagaaactcagaaaaagcaaattgttcatttcgacgacgatatagatcaccacttgcatttaaaaattgctcaaggtgacttgaatccatatgattttcaccaacctctagccaacagagagcacaaattacagctggcatccaagtcaaatatagagttcgggaaaactaatactactaattctgaagccaaagtcaaaccaatagaatcgttcttccaaaaaatgacaaaattggatcataacccaaaagttgcaaataacatccatagtctaagacaagcggaagacaaactgacaatggcaattaagcgtaggaaattaagtaatgccaatgtagtccaagaaacgttgaaggatacaagaagcaaattttttaataaaccctccatgactgttgtggaaaacttcaaagaaaaaggcgacagcatacaggattttaaagaggacacaaactcacaatctttggaagagcctgtttccgagtctcaactatctacacaaatacctagttcttttattacaaccaatttagaggatgacgacaacctgagtgaagaggtttctgaagttgtcagtgacattgaagaggaccgaaagaattctgaaggaaagactatcggtaacgaaatctataatacagatgatgacggtgatggcgatactagcgaggattatagcgaaactgcggaatcaagagttcccacgagcagcaccacctcatttcccgggtcatcccagaggagtatatcggggtgcacaaaagttttacaaaagtttagatattcatcttcattcagcggagttaatgcaaatagacaaccactatttcctcggcacgttaatcaaaaaagtagaggaatggtatacgtcaatcaaaatagagatgatgattgcgacgataacgatggtaaaaatcaaatcacgcaaaggccatcactgcgaaaaagccttattggtgccaggtcacagagaattgtgattgacatgaaaagcgtagatgaacgaaaatcattcaattcatcaccaattttgcatgaggaaagtaagaaaagggacatcgaaactactaagtcaagccaagctcggccggcagtcagatctatctccttgctttcccaatttgtttataaaggtaaataa

SEQ ID NO: 769 - protein, 702 aa, Saccharomyces cerevisiae
MGIQGLLPQLKPIQNPVSLRRYEGEVLAIDGYAWLHRAACSCAYELAMGKPTDKYLQFFIKRFSLLKTFKVEPYLVFDGDAIPVKKSTESKRRDKRKENKAIAERLWACGEKKNAMDYFQKCVDITPEMAKCIICYCKLNGIRYIVAPFEADSQMVYLEQKNIVQGIISEDSDLLVFGCRRLITKLNDYGECLEICRDNFIKLPKKFPLGSLTNEEIITMVCLSGCDYTNGIPKVGLITAMKLVRRFNTIERIILSIQREGKLMIPDTYINEYEAAVLAFQFQRVFCPIRKKIVSLNEIPLYLKDTESKRKRLYACIGFVIHRETQKKQIVHFDDDIDHHLHLKIAQGDLNPYDFHQPLANREHKLQLASKSNIEFGKTNTTNSEAKVKPIESFFQKMTKLDHNPKVANNIHSLRQAEDKLTMAIKRRKLSNANVVQETLKDTRSKFFNKPSMTVVENFKEKGDSIQDFKEDTNSQSLEEPVSESQLSTQIPSSFITTNLEDDDNLSEEVSEVVSDIEEDRKNSEGKTIGNEIYNTDDDGDGDTSEDYSETAESRVPTSSTTSFPGSSQRSISGCTKVLQKFRYSSSFSGVNANRQPLFPRHVNQKSRGMVYVNQNRDDDCDDNDGKNQITQRPSLRKSLIGARSQRIVIDMKSVDERKSFNSSPILHEESKKRDIETTKSSQARPAVRSISLLSQFVYKGK

SEQ ID NO: 770 - DNA, 1206 bp, Selaginella moellendorffii
atggggatccagggccttcttccggcgctcaaatccatcacgacatcgacgaatgtgaaagagtactcgggcatgagggtcgctgtagacacttactcgtggctgcacaaggccgcatttagttgtagcaaggacatttgcgatggtcgggcgacagccagctttctgaactactgcatgcaccgcgtgaatctcttgcgacaccatgggatcaaacctttgctggttttcgatggaggctcattgccaatgaaagccgagcaagaagaaaagcgctccagagccagggaagagcatctaaagctcgctcgtgaatgcgaagcatctggaaatcatgctgcagcctacgatcactatcaaaaggcagtagacattactcccgaagttgcgcaccagcttatcctggtccttcgcagagaaaatgtggaatacattgtctctccgtatgaagccgatgcacagatggcctttctggcactgcgcggtgttgtcgacgctgtaatcactgaagactcggacctggttgcgtacggttgtccaaagatccttttcaaaatggacaagaatggtcaaggttttgagcttcagtatgctgacctggtgaagaacagggacttgaatctgacgagtttcacaaagaggatgatgctggaaatgtgcatccttagtggctgcgactacttgccatctttgcaaggcatgggagtgaaaagagctcataatttaatccgcagatttcgaagctacgagaaggtgattagacacttgaaattttcgggcgtaatgataccgaagtcttacgaagaaggcttcagaaaggcattgcttactttttgtcatcaccttgtctatgatcctacgcaagatgaattggtgcaccttactgaacttcccgccgactgcagcgaagaggtggagtttctcggaccatatccttttaaaagtctatgcattctacactcggaacttaactccgacaaacaaagctttcccgaagtctcgtgcagcagattgtccgaggcgtcatacatccggaaactcatgctccacttcaggtatactaggctttgtattgtcccgtatgctaatcaccgtgtgctaacaagcttgctgagccgccacagtctttatgcgaagatagaaagccaattgcaaaacaaaaagaacaaaagcgtctcaacttacctgcgcagaggaatgtgctga

SEQ ID NO: 771 - protein, 401 aa, Selaginella moellendorffii
MGIQGLLPALKSITTSTNVKEYSGMRVAVDTYSWLHKAAFSCSKDICDGRATASFLNYCMHRVNLLRHHGIKPLLVFDGGSLPMKAEQEEKRSRAREEHLKLARECEASGNHAAAYDHYQKAVDITPEVAHQLILVLRRENVEYIVSPYEADAQMAFLALRGVVDAVITEDSDLVAYGCPKILFKMDKNGQGFELQYADLVKNRDLNLTSFTKRMMLEMCILSGCDYLPSLQGMGVKRAHNLIRRFRSYEKVIRHLKFSGVMIPKSYEEGFRKALLTFCHHLVYDPTQDELVHLTELPADCSEEVEFLGPYPFKSLCILHSELNSDKQSFPEVSCSRLSEASYIRKLMLHFRYTRLCIVPYANHRVLTSLLSRHSLYAKIESQLQNKKNKSVSTYLRRGMC

SEQ ID NO: 772 - DNA, 1056 bp, Volvox carteri
atgggaataaatggcctattacagcaattgaaaagcatatcaaggcccacgcatgtgagctcataccgtggacagaaggtggccatagatggttactcgtggctccacaagggtgcttacagttgcagccgcgagctatgcgaaggaatctgggccgatggatataccaggtactttatttcgcgaatcgacatgctcctgggcaacggagtcattcctatcgtcgttttcgacgggtgccgcctccccatgaaggctgacgaggaggatagccgtagaaggagccggcgagaggccctagagcgcgcccggacccactccgcctcgggcaacatggctgcggccacggagtgctaccagcgggctgtggacattgcgccgtggatggccaaggtcgtcatggaggccctccgcgaacgccaggtgacgtgcctggtggcgccgtacgaagccgacgcgcagatgtcgtacttggcgctgcgtggcgacgtgcatgctgtgctgacagaggacagtgacatgttggcgtacggctgcccccgggtgctgtacaagttggaccgcggtggttcgggggaggaggtgatgctgtcggatcttcctttggttcgggaaatcaacatggcgggtttcaaccacgacatgctgctgcagatgtgcatcctggcgggctgtgacttcttgcccaacatacctggggtgggcatcaagaaggcgcatgccatgatccgcaagcaccgagatttcgtcaaggtcgtccgcaacctgcatttcaacggcacctctccgcctcctggctacgagatccgcttccagcgtaccctctggctcttccgccaccagcgggttttttgtcccatcgcgcgtgcgctgacgcacctgcgtccgctgccgcctggcggcttgggcgccgcagatgttctggtgctggcggcgttgccgcctgagggcccggagcgcgaggcgcttcatttccttgggccgcccatggcagccgaggtggcgactgggattgcgatgggtgggtgcagggttgtgcggtgccgtgccgtgtga

SEQ ID NO: 773 - protein, 351 aa, Volvox carteri
MGINGLLQQLKSISRPTHVSSYRGQKVAIDGYSWLHKGAYSCSRELCEGIWADGYTRYFISRIDMLLGNGVIPIVVFDGCRLPMKADEEDSRRRSRREALERARTHSASGNMAAATECYQRAVDIAPWMAKVVMEALRERQVTCLVAPYEADAQMSYLALRGDVHAVLTEDSDMLAYGCPRVLYKLDRGGSGEEVMLSDLPLVREINMAGFNHDMLLQMCILAGCDFLPNIPGVGIKKAHAMIRKHRDFVKVVRNLHFNGTSPPPGYEIRFQRTLWLFRHQRVFCPIARALTHLRPLPPGGLGAADVLVLAALPPEGPEREALHFLGPPMAAEVATGIAMGGCRVVRCRAV

SEQ ID NO: 774 - DNA, 2024 bp, Saccharomyces cerevisiae
atgggtgtgcattcattttgggatattgcaggtcctacggcaagaccggtcaggctggaatccttggaagataagagaatggcagtagatgcctccatttggatatatcagtttttgaaagctgtccgtgatcaggaggggaatgcagtgaagaattctcatattactgggttctttagaagaatttgtaagctattatactttggcattaggccggtattcgtctttgatggtggtgtgcccgtattgaaaagggaaacaatacggcagaggaaagaaagaagacagggaaaacgagagagtgcgaaatccaccgctaggaagctgctggctttacaattgcaaaacggctcaaacgataacgtaaaaaactctacaccgagtagtggcagtagtgtgcagatcttcaaacctcaggacgagtgggacttgcccgatataccgggattcaaatacgataaggaagatgcaagagttaactctaataaaacttttgaaaaactgatgaattcgataaacggtgatggactggaagacattgatttagacactataaatccagcatcggccgaatttgaagagctgccaaaggccacacagtatttgatattatcgtcgttgaggttgaaatcaagactgaggatgggatactcgaaagaacaattggagaccatcttcccaaatagtatggatttctcaagatttcaaatagacatggtgaaaaggaggaatttttttactcaaaagttaatcaacactactgggtttcaggatggtggagcgtctaagctgaacgaggaggtgatcaataggatatccggccaaaagagtaaagagtacaagttgactaagactaataacgggtggattcttggactaggggcaaacgatggctctgatgcgcaaaaagcaatcgtaatagacgataaagatgcaggcgctttggtaaagcagttagatagtaatgctgaggacggggacgtgctccgatgggatgatttggaagataattccttaaaaatagtgcgacatgagtcttctaacgcgacgacagctccacagaaaaggagtaaccggtcagaagatgagggatgtgactctgatgaatgtgagtgggaagaagttgaactcaagcccaagaacgtcaagtttgtggaagatttttctttgaaagctgcaaggttgccttacatgggccaatccctaaacaacgctggcagtaaatcgtttttggacaaaagacatgatcaggcatcgccctccaagactactccaacaatgagaattagcagaatcagcgtggaagacgacgatgaggattacctgaaacaaattgaggaaattgaaatgatggaggcagtgcaactttctaagatggaaaagaaacctgaagcggacgacaaatcaaaaatcgctaagccggtaacgtcaaaaggtacagaggctcgtccaccaatagtacagtatggattacttggcgcacaaccggatagtaagcaaccgtatcatgtcacaaatttgaatagcaaatcagagtcggtcatcaaaaggaccagcaagacagttctttctgagtttaggccaccgtctcagcaggaggataaaggggctattttaacagagggggagcaaaacctgaattttatttctcacaagataccacagtttgattttaacaatgaaaattccctgctttttcaaaagaataccgagagtaatgtgtcccaagaagccacgaaggaaaagtctccaattcctgaaatgccgagctggttttcttcaactgcttcccagcagttgtataatccctataacacaacaaatttcgtggaagataaaaacgtaagaaatgaacaagaaagtggagcagaaactaccaataaagggagtagctatgaactcttgacaggcttaaatgctacggaaatattagaaagagaaagcgagaaagagagctccaatgatgaaaacaaggacgatgacttagaagttttatcagaagaactatttgaggacgttcccac

SEQ ID NO: 775 - protein, 1031 aa, Saccharomyces cerevisiae
MGVHSFWDIAGPTARPVRLESLEDKRMAVDASIWIYQFLKAVRDQEGNAVKNSHITGFFRRICKLLYFGIRPVFVFDGGVPVLKRETIRQRKERRQGKRESAKSTARKLLALQLQNGSNDNVKNSTPSSGSSVQIFKPQDEWDLPDIPGFKYDKEDARVNSNKTFEKLMNSINGDGLEDIDLDTINPASAEFEELPKATQYLILSSLRLKSRLRMGYSKEQLETIFPNSMDFSRFQIDMVKRRNFFTQKLINTTGFQDGGASKLNEEVINRISGQKSKEYKLTKTNNGWILGLGANDGSDAQKAIVIDDKDAGALVKQLDSNAEDGDVLRWDDLEDNSLKIVRHESSNATTAPQKRSNRSEDEGCDSDECEWEEVELKPKNVKFVEDFSLKAARLPYMGQSLNNAGSKSFLDKRHDQASPSKTTPTMRISRISVEDDDEDYLKQIEEIEMMEAVQLSKMEKKPEADDKSKIAKPVTSKGTEARPPIVQYGLLGAQPDSKQPYHVTNLNSKSESVIKRTSKTVLSEFRPPSQQEDKGAILTEGEQNLNFISHKIPQFDFNNENSLLFQKNTESNVSQEATKEKSPIPEMPSWFSSTASQQLYNPYNTTNFVEDKNVRNEQESGAETTNKGSSYELLTGLNATEILERESEKESSNDENKDDDLEVLSEELFEDVPTKSQISKEAEDNDSRKVESINKEHRKPLIFDYDFSEDEEDNIVENMIKEQEEFDTFKNTTLSTSAERNVAENAFVEDELFEQQMKDKRDSDEVTMDMIKEVQELLSRFGIPYITAPMEAEAQCAELLQLNLVDGIITDDSDVFLFGGTKIYKNMFHEKNYVEFYDAESILKLLGLDRKNMIELAQLLGSDYTNGLKGMGPVSSIEVIAEFGNLKNFKDWYNNGQFDKRKQETENKFEKDLRKKLVNNEIILDDDFPSVMVYDAYMRPEVDHDTTPFVWGVPDLDMLRSFMKTQLGWPHEKSDEILIPLIRDVNKRKKKGKQKRINEFFPREYISGDKKLNTSKRISTATGKLKKRKM

SEQ ID NO: 776 - DNA, 1803 bp, Arabidopsis thaliana
atgggagtgaagtatctttgggatgtcttggagccttgtaagaagactttcccactcgatcatcttcaaaacaaaagggtatgcgtggatctttcgtgttggatggtggaattgcataaagtgaacaaatcttattgcgccactaaagaaaaagtttatcttcgaggattttttcatcgtctccgagccctaattgccctaaactgctccatcattttagtctcagatggtgcaattcctggaatcaaagtaccaacttacaagcgtcggttaaaagcaagattcgagatcgctgacgatggtgttgagcctagcaaagagacttcactcaaaagaaatatggggtctgagttctcgtgcatcataaaagaggcgaaagttattgcatcaacactagggatactttgtttagacgggattgaggaggctgaggcgcaatgcgctctgctaaactcggaatccttatgtgacgcctgttttagctttgattcggatatcttcctttttggtgcaaagactgtatacagagaaatatgccttggtgaaggaggttatgttgtttgctacgagatggatgacatcaagaaaaagcttgggcttggacggaactcattgatagctctagcgcttttgcttggcagtgactactctcagggagttcgtggtcttcgacaggagaaagcttgtgagcttgttaggtcgattggagacaatgttatccttgaaaaagttgcatcagaaggactttcctttgcggaaaagccgagaaagtctaagaagcaagttaggccttctgtgtgcagcaaaaaggggaccttacctttggtggttataaatggaaataatcgtgatccagaaagactggaagagatcaagcaggtgatcgatgcgttcatgaaccccaagtgccaccaagcagactctaatacagtttccagggccttagctgaattctctttccagcgcaccaagcttcaggagatatgccatcagttctttgagtggccccctgagaaaacagatgaatacatacttcctaaagttgctgaaagaaatctgagaaggttcgctaatctgcaatcaagatcaactgaggttgaagttaaccttcctctccacaagccgcagatgccagagaagtgtccggtgtctgaaatcataaagacccgaaaagtacaggggcgagaatgttttgaagtctcatggaatgatctagaagggttagagtcgtccattgttcctgcagatcttgtagaaagggcttgtcctgagaagatcatagagttcaaggagaaaatggcagcaaaaaagaagaaaccgaagccgaaacaaaaacagaaggaaacgagttcaccgaccaaatcttcttctcttgtcgaactcagcctcgaactccaacaccttgatctcaactcaacctctctagtaagtagaagcaccttagaagaagcagagcaagagaacgaacaacaaaactccaagaaacatgattacttgcgtcttatcgattcacctgatagagaaaattgcaataacgcttggtcaaacagggatagattgggtgttggaatgagttcatttccattgtatccggaaacagaagtcattgatctgataagcccttgtcctgaagctcgttcacggagcgtgtcaagaagttatcaagaacagaagagccatgatcaccaacttgagactgtgattgagctgagtgattcagagacagatgatgaggaacattgcaagaaagctagagagcttaggatctttcttcaaaatatcaggaaagacattatcctatga

SEQ ID NO: 777 - protein, 600 aa, Arabidopsis thaliana
MGVKYLWDVLEPCKKTFPLDHLQNKRVCVDLSCWMVELHKVNKSYCATKEKVYLRGFFHRLRALIALNCSIILVSDGAIPGIKVPTYKRRLKARFEIADDGVEPSKETSLKRNMGSEFSCIIKEAKVIASTLGILCLDGIEEAEAQCALLNSESLCDACFSFDSDIFLFGAKTVYREICLGEGGYVVCYEMDDIKKKLGLGRNSLIALALLLGSDYSQGVRGLRQEKACELVRSIGDNVILEKVASEGLSFAEKPRKSKKQVRPSVCSKKGTLPLVVINGNNRDPERLEEIKQVIDAFMNPKCHQADSNTVSRALAEFSFQRTKLQEICHQFFEWPPEKTDEYILPKVAERNLRRFANLQSRSTEVEVNLPLHKPQMPEKCPVSEIIKTRKVQGRECFEVSWNDLEGLESSIVPADLVERACPEKIIEFKEKMAAKKKKPKPKQKQKETSSPTKSSSLVELSLELQHLDLNSTSLVSRSTLEEAEQENEQQNSKKHDYLRLIDSPDRENCNNAWSNRDRLGVGMSSFPLYPETEVIDLISPCPEARSRSVSRSYQEQKSHDHQLETVIELSDSETDDEEHCKKARELRIFLQNIRKDIIL

SEQ ID NO: 778 - DNA, 1926 bp, Oryza sativa
atgggggtgaagaacctgtgggacatcctggagtcgtgcaagaagaagctcccgctccaccacctccagaacaagaaggtgtgcgtggacctgtcgtgctggctggtccagatgtacagcgccaaccgctcgccggccttcgccaaggacaaggtctacctcaagaacctcttccaccgcatccgcgccctcctcgccctcaactgcaccctcctcttcgtcaccgatggggctataccttcacttaagttggccacttaccgccgtcgcctcggatccatttctcatgctgctaaagaatcagatcagcccaattcacacccatccatttcactgcgtcgcaacaagggttccgagttctcctgcatgattaaagaggccaagcgtctcggcatggccctcggcatcccttgcttggacggattggaggaggctgaagcacagtgtgcatccctagatctagagtcactctgtgatggctgtttcacttcagactcggatgcttttctttttggcgctaggactgtttatagagatgttttcataggggagggtggctatgtcatttgctatgaaatggaagacatagagaaaactcttggctttggcaggaactcgctgatatcacttgcagtgctccttggtagtgattattctaatggagttaatgggtttggcccagaaacagcatgccggcttgttaagtctgtaggcgacaatttaattcttgatcagattttgtctaatggagttaaagctactagaaaatgtaaagggaaaaatagtggaaacaaggtggacgacatgtgccccaaagcaagttcctgcgaggttggcatgactcaagactctgatggtcaatttcgtgacgtcataaatgcatatctggagccaaaatgtcactcacctgattcggaagctgtgcagagggtatgcggacagcacccatttcttcggccacagcttcaaaaaatatgcgaggaatattttgattggagtccagagaaaactgatcaatatatacttccgaagattgctgagagagaacttcggaggttttcagaccttcgctctgcgtcttcagcactaggaataaaacctttgttgagtgagataccagtaccatgccctgtactggcgattgtgaagcagaggaaagttcatgggaatgaatgttatgaggtttcatggagaaatatagaagggctccaagtttcagtagtccctggggatcttgttaaaagtgcgtgcccggagaaaataacagaatttttggagaagaagggtgaagagaagaagcagaagaggagagcaaggccaaagaaatcagggcaggctgcagtgaaagatgttgatgaacagctccaagagttgctgcttggtattgaagctgatagtggtggcatattgggtgctacagccagtgtgtgtcagactctgacagcagcctacactgtggctgtggaagatgtagttgatctgtcgtctccttctcctcctcttcggaagctctccaagtcccaaaagaagatgatggccgaggatgtcaatgtggctggtatgaacatgaacaagatggagtcagaaagtagttttagcacgcaatcaagtactagtgatgttgacaaccagctgattgatctgtcttcacccctggctggtggtgataatggtatgaaaggtggaagaagagccctggcagacataagcaatgttggttcacacagcactgagacagacggaggaggaggaggtggtggtggtgtggcatcggtcggccatggaaccaccatcgacctatcttctccgtcgccggccataggcgacagatcaagggttcatcacgatgatgatgatgtaatacacgagaggaaagcaagggacctgagaatgttcctggacagcatacggaacgagctgtattga

SEQ ID NO: 779 - protein, 641 aa, Oryza sativa
MGVKNLWDILESCKKKLPLHHLQNKKVCVDLSCWLVQMYSANRSPAFAKDKVYLKNLFHRIRALLALNCTLLFVTDGAIPSLKLATYRRRLGSISHAAKESDQPNSHPSISLRRNKGSEFSCMIKEAKRLGMALGIPCLDGLEEAEAQCASLDLESLCDGCFTSDSDAFLFGARTVYRDVFIGEGGYVICYEMEDIEKTLGFGRNSLISLAVLLGSDYSNGVNGFGPETACRLVKSVGDNLILDQILSNGVKATRKCKGKNSGNKVDDMCPKASSCEVGMTQDSDGQFRDVINAYLEPKCHSPDSEAVQRVCGQHPFLRPQLQKICEEYFDWSPEKTDQYILPKIAERELRRFSDLRSASSALGIKPLLSEIPVPCPVLAIVKQRKVHGNECYEVSWRNIEGLQVSVVPGDLVKSACPEKITEFLEKKGEEKKQKRRARPKKSGQAAVKDVDEQLQELLLGIEADSGGILGATASVCQTLTAAYTVAVEDVVDLSSPSPPLRKLSKSQKKMMAEDVNVAGMNMNKMESESSFSTQSSTSDVDNQLIDLSSPLAGGDNGMKGGRRALADISNVGSHSTETDGGGGGGGGVASVGHGTTIDLSSPSPAIGDRSRVHHDDDDVIHERKARDLRMFLDSIRNELY

SEQ ID NO: 780 - DNA, 1779 bp, Populus trichocarpa
atgggagtgaagaacttatgggacatcttagaatcatgcaagaagaccctgccgcttcaccatctccagaacaaaagggtttgtatagatctgtcttgttggatggttcaactccaaaatgtaaacaaaacacactgcggattggttaaagacaagccctatattaggaatctgtttcatcgcctaagagctctcattgctttgaattgcagccttatttttgttgctgatggatcaatccctgctatcaaattagccacttaccgtcggcgcttgaatttaggacttgaggttacccaagatgaaacaaattcacaaaaagcttgctcacttcggagaaacatgggatcagagttctcatgcatgatcaaagaagcaaaagatattggattagcacttgggatcccttgcttagatagcattgaggaagctgaagcacagtgtgcattgttaaacacagaatcattgtgtgatggttgtttcagctcagattcagatgtcttcctttttggtgcaaggaccgtgtacagagacatatgtcttggagaaggacatgttgtttgttatgaaatggaagaagtagaaagaaaacttgggtttgggaggaactcgttgatcacgctagcccttatacttggaagtgattactctccaggagtgcatggcctaggtccagagtcagcatgccaaattgtcaagtcaattggagatagcaatgtccttcaaaaaattgcatcagagggactgccctttgcaaagaagataaaaacttcaaagaagcagatgcgcagtaaaaaaacaaactctctggattctgaaatccattttaatggaagcgataacaattcagaaaggaagaatgagtgcttgcaagtgattaatgcatatctgaagcccaagtgccacccagcagattctgatgcagcctgtagggttctttctcagcatccatttcaacgtctcaaacttcaagggatatgtgctcagttctttgggtggcctccagagaaaacagatgagtacacccttccaaaaattgctgaaagagacttgcggagatttgccaatctgcgatcaacttcatcagagttaggagttaatcttcctctgcaaaagttatcttgtacacaactagctaaaccttctcaatggcagataccagttaagtgccctgtatctggagttgttaaacagagaaaggttcagggaacagaatgctttgaggtgttgtgggaagggtttgatggacttaaaacctccatagttccagcagatctcttagagagtgcttgtccggaaaagattgcagagtttgaggagaaaacagctttgggaaagaaacaaaatcaacgcaaacctggatcaaagaaatcaggaaacaggcttgctatggccgaaattgatttaaaactccaaactttgctgcttgacattgaaccaggaagcaatactgcctgtagcacctccttgtcatcaaaagcagcaatttcagaagataggactacttcaactgcggctagtcatacaaaactagatccacgtaatgctggttgtagagctgccttgtttactgataccagtcagtatgaggtcattgatctctgtagcccctctcccgtagcccgaactcgtactgtttcaagatgtcaacgagtgaatgatcaacatagtgaggtgatagatttgagtgaatcagagaatgaaatgtcacctgaacatgcaaggaaggcaagagcgcttagaatgtttatagccagtattagggatgatatgtcatga

SEQ ID NO: 781 - protein, 592 aa, Populus trichocarpa
MGVKNLWDILESCKKTLPLHHLQNKRVCIDLSCWMVQLQNVNKTHCGLVKDKPYIRNLFHRLRALIALNCSLIFVADGSIPAIKLATYRRRLNLGLEVTQDETNSQKACSLRRNMGSEFSCMIKEAKDIGLALGIPCLDSIEEAEAQCALLNTESLCDGCFSSDSDVFLFGARTVYRDICLGEGHVVCYEMEEVERKLGFGRNSLITLALILGSDYSPGVHGLGPESACQIVKSIGDSNVLQKIASEGLPFAKKIKTSKKQMRSKKTNSLDSEIHFNGSDNNSERKNECLQVINAYLKPKCHPADSDAACRVLSQHPFQRLKLQGICAQFFGWPPEKTDEYTLPKIAERDLRRFANLRSTSSELGVNLPLQKLSCTQLAKPSQWQIPVKCPVSGVVKQRKVQGTECFEVLWEGFDGLKTSIVPADLLESACPEKIAEFEEKTALGKKQNQRKPGSKKSGNRLAMAEIDLKLQTLLLDIEPGSNTACSTSLSSKAAISEDRTTSTAASHTKLDPRNAGCRAALFTDTSQYEVIDLCSPSPVARTRTVSRCQRVNDQHSEVIDLSESENEMSPEHARKARALRMFIASIRDDMS

SEQ ID NO: 782 - DNA, 2097 bp, Sorghum bicolor
atgggggtgaagaacctctgggacatcctcgactcctgcaagaagaagctcccgctccagcacctccagaacaagaaggtgtgcgtggatctttcctgctggctcgtgcagttctgcagcgccaaccgctccccggccttcctcagggataaggtctacctcaagaacctcttccaccgtatccgagccctcctcgccctcaactgcagcctcatctttgtctcagatggggcgattccttcagtcaaattggctacttataggcgccgcctgggattaaatgctgctgaggctactcgagaggaggccaactcacaacctctgacttctttgcgccggaacaagagctcagagttctcacgcatgatcaaagaagccaagcatctcgggttggcccttggcatcccctgcttggatggtgtggaagaggcagaggcacagtgtgcaatgcttaattttgcctccttgtgtgatggctgttttacatcggattccgattcattcctgtttggtgcaaggacagtttatagagatgttttcataggagagggtggttatgtaatttgctatgaaatggaagacattcagaagaagcttggtttcggcaggaactcactgatatcacttgcagttcttcttggcagtgactattctaatggagtccatggctttggcccagaattagcatgccgccttgttaaatctgtgggggatgatgccattcttgatcaaattttgtccgatggagttaaacctgcaaggaaatgtaaaggaaaaaatagtggtgccattgcagggagggttggtggaacatgcccaaaagcgagtacctgtgaggttgggattaaccaagattctggtggtcaatttcgtgacataataaatgcatatctggagccaaaatgtcattcaccagattcagaagccgtgcagagggcatgcagtcagcagccatttcttcggtcacagctgcaacagatatgtgagcaatactttgagtggagccctgtgaaaactgatgaatatatccttccaaagattgctgagagagaacttcgaagattttcaaatctccgctccacgtcttcagatctaggaataaaaccttcactggatgagatgccagtaccgtgccctgtactggcaattgtgaagcagcgaaaagttcaaggaagtgaatattatgaggtttcatggagaaacatagatgggctccaagtttcagttgttccaggggatcttgttagaagtgcttgcccagaaaaaataactgtctttttggaaaacaaggatgctcagaagaagcaaaagaggagagctaggccaaagaaatcaggtcaagctgctgctgccttaaaagacgtggatgcgcagctccaagaattgctacttggaattgaatctgaaagcagtacatttccatgtacagccaatggccctcagactcagacagcagatatgcagatggtggcaccgctccaggattttgttgatctgtcttctccatcaccacctatacgatcttgtaagatggccagatccagaaagttcagtgattcagacgcagtaaccatgggtcagattgatctgcagcaccaaaatctgctgattggatcaatggagtcaaattcgacactagatcatgagccaattgatctttcatcaccctcgccttgcgctgctcataaaccccaggcagctccagaaggaccgccactgtgtatggaagcagaaagaagagccctctgggatataagcaatttgcccgagaaagaaccctcctgttgcaagcatgaacctggaacaagtggctgtgatgtgcaggtggaagaatcaccattgttcaggcatgggactgggatggcaggcaaagctgattcctcacagaggagcgatggacaaagtagtgaagtagtagaacccaccatgatcgatctctcttctccttcaccggttaaagtggataagagtagacggaatggccagaagcctgaccaggattgtgaggctgatgatggcagtcagtctccagaacacgagaggaaagcgagggagctcagattgtttctaaacagtataagagacgagctaaactaa

SEQ ID NO: 783 - protein, 698 aa, Sorghum bicolor
MGVKNLWDILDSCKKKLPLQHLQNKKVCVDLSCWLVQFCSANRSPAFLRDKVYLKNLFHRIRALLALNCSLIFVSDGAIPSVKLATYRRRLGLNAAEATREEANSQPLTSLRRNKSSEFSRMIKEAKHLGLALGIPCLDGVEEAEAQCAMLNFASLCDGCFTSDSDSFLFGARTVYRDVFIGEGGYVICYEMEDIQKKLGFGRNSLISLAVLLGSDYSNGVHGFGPELACRLVKSVGDDAILDQILSDGVKPARKCKGKNSGAIAGRVGGTCPKASTCEVGINQDSGGQFRDIINAYLEPKCHSPDSEAVQRACSQQPFLRSQLQQICEQYFEWSPVKTDEYILPKIAERELRRFSNLRSTSSDLGIKPSLDEMPVPCPVLAIVKQRKVQGSEYYEVSWRNIDGLQVSVVPGDLVRSACPEKITVFLENKDAQKKQKRRARPKKSGQAAAALKDVDAQLQELLLGIESESSTFPCTANGPQTQTADMQMVAPLQDFVDLSSPSPPIRSCKMARSRKFSDSDAVTMGQIDLQHQNLLIGSMESNSTLDHEPIDLSSPSPCAAHKPQAAPEGPPLCMEAERRALWDISNLPEKEPSCCKHEPGTSGCDVQVEESPLFRHGTGMAGKADSSQRSDGQSSEVVEPTMIDLSSPSPVKVDKSRRNGQKPDQDCEADDGSQSPEHERKARELRLFLNSIRDELN

SEQ ID NO: 784 - DNA, 1695 bp, Vitis vinifera
atgggtgtgaaaaacctctgggacatcttggaatcttgcaagaaaactctcccactttaccacctccagaacaagagggtgtgcatcgatctttcatgttggatggttcaacttcaaaatgtaaacaaatctcatgcttcaatcaaggacaagctttatctcaaaggcctctttcaccgtcttagagctctcattgctttgaattgtagccttctttttgtcacagatggatcaatccctgcaatcaaactagccacttacagacggcgcttaaattcaggaactgaggtcactcgagatgaaacaaactcccataatgtgccttcgctccggagaaatatgggatctgaattctcatgtatgataaaggaggcaaaagtccttggcttggcacttggtatcccttgcttagatgggattgaagaagctgaagcacagtgtgcattgttaaactcagaatcattatgtgatggatgtttcacttcagattcagatgttttcctttttggtgcaaggacagtttacagagacatttgccttggggaaggcggttatgttgtttgttatgaaatggcagacatagagagcacacttgggtttggaaggaactccttgattactctggcacttcttcttggtagtgattactctcagggagttcatgggtttgggccagagtcagcatgccagattgttaaatcagttggtgaagaagttgttctcaaaaaaattgcattagaagggatatcctttgcaaagaaatcaaagggttcaaggaaacaggggcaagttcttaagtgcaatgacaaagagaattgttcagaccatgaaatgaacattaatggatctgagcatagttcacaaagggagttcttgcgagtaattgatgcttatttgaaaccaaaatgtcactctgcagactctgatgcagtgcatagggctcttgctcttcttccatttcaacgcactgaagctcagaagatatgtgctcagttgtttgagtggcctcctgagaaaacaggtactttcttcctcaaaatttttactttatacttgcggcgatttgccaatttgcgttcaacttcttcaaacttgggaattcattttccgttgcacgagataccagtaaaatgccctatttctggaattataaagcacagaaaagtccaaggaagagaatgctttgaggtttcctgggaagagtttgatggccttaaatcctccataataccagcagagcttgtgaagagtgcttgtcctgaaaagattgtggagtttgaagggagaaaaccccaagagaagaaacaaaatcatcgtaaaccaaggccaaagaaatccaataacagaactcccttggctgagattgataaacaactccaaaatctattgcttgatatagaatcaggaggcaattcttttcaaaatgtttcattttcttcaagcatgacaccatccaaaacccaaattgatgcaaccaaagcagcaaaaacacaatatatgttgcttgatacagagtcagagagcgacaatgacaatcacaatgaagccataatttgccatcagaatggtcgatgcggtgctgaaatagtcattgatctgctaagcccttccccagcaatacgtgcccgaaaggtttcgaagtgccaacaaggcaataatggccaacaaattgatgtaattgatttgagtgattga

SEQ ID NO: 785 - protein, 564 aa, Vitis vinifera
MGVKNLWDILESCKKTLPLYHLQNKRVCIDLSCWMVQLQNVNKSHASIKDKLYLKGLFHRLRALIALNCSLLFVTDGSIPAIKLATYRRRLNSGTEVTRDETNSHNVPSLRRNMGSEFSCMIKEAKVLGLALGIPCLDGIEEAEAQCALLNSESLCDGCFTSDSDVFLFGARTVYRDICLGEGGYVVCYEMADIESTLGFGRNSLITLALLLGSDYSQGVHGFGPESACQIVKSVGEEVVLKKIALEGISFAKKSKGSRKQGQVLKCNDKENCSDHEMNINGSEHSSQREFLRVIDAYLKPKCHSADSDAVHRALALLPFQRTEAQKICAQLFEWPPEKTGTFFLKIFTLYLRRFANLRSTSSNLGIHFPLHEIPVKCPISGIIKHRKVQGRECFEVSWEEFDGLKSSIIPAELVKSACPEKIVEFEGRKPQEKKQNHRKPRPKKSNNRTPLAEIDKQLQNLLLDIESGGNSFQNVSFSSSMTPSKTQIDATKAAKTQYMLLDTESESDNDNHNEAIICHQNGRCGAEIVIDLLSPSPAIRARKVSKCQQGNNGQQIDVIDLSD

SEQ ID NO: 786 - DNA, 1713 bp, Arabidopsis thaliana
atgggtgtgggaggcaatttctgggatttgctgagaccatatgctcagcaacaaggctttgattttctcagaaacaaacgagtcgctgttgatctctccttctggatcgttcagcatgaaaccgctgttaagggtttcgtccttaaacctcacctccgactcactttcttccgtactatcaacctcttctcaaagtttggagcgtacccggtttttgtggttgatggaacaccatcacctttgaaatctcaggcgagaatctccaggtttttccgttcttctggaattgatacttgtaatctacctgtgattaaagatggtgtctcggttgagagaaacaagctgttttctgaatgggttagggaatgtgtggagctactcgaattgctcggtattccggtgctgaaagctaatggtgaggctgaagctctctgtgcacagttaaacagccaaggttttgtggatgcttgcattactcctgatagtgatgctttcctttttggtgctatgtgcgtgatcaaagacatcaagcctaattcaagagaaccttttgaatgctaccatatgtcacatatcgagtctggcctcggtttgaagcggaaacacttgattgctatttctctattggtgggaaacgattatgattcaggcggtgttcttgggattggtgtggataaagcactgcgcattgttcgtgagttttctgaagaccaagtacttgaaagactacaggacattggaaatgggttgcaacctgcagttcctggtggaatcaaatccggggatgatggtgaagaattccgctcagagatgaaaaaaagatctcctcactgttcccgttgtggacacctgggcagcaagagaactcattttaagtcctcttgtgagcactgcggttgtgatagtggttgcattaaaaaaccattagggtttagatgtgaatgctccttttgttccaaggatcgagatttaagggaacaaaagaaaaccaatgattggtggatcaaagtctgcgataagattgctctagcgccagagtttcccaacagaaagattattgaactttatctatccgatggtttgatgacaggagatggatcgtcaatgtcttggggaactcctgatactggaatgctagtggatctcatggttttcaaactgcactgggacccatcttatgttagaaaaatgttgcttccgatgctgtcgaccatttatctgagagaaaaggcaagaaacaacacaggatacgctttgttgtgtgatcaatacgaatttcattcaatcaacgagccagaagaatcaattgttgtattggaagaagaagaagagtctgttgatccgttggatggtttaaatgaacctcaggtgcaaaatgataatggtgactgcttcttgctaactgatgaatgcataggacttgttcagtctgctttccctgatgaaacagagcattttctacatgagaagaaactgagagagtcgaaaaagaagaatgtttctgaagaagaaacagcaacaccaagagcaacaacaatgggtgtacaaagaagcattaccgatttctaccgttcagcgaagaaagcagcagcaggtcaaagtatagagacaggcgggagttcaaaagcttctgcggaaaagaagagacaggcaacttctactagtagtagtaaccttacaaagtcggtcaggcgtcgtctcttgtttggatag

SEQ ID NO: 787 - protein, 570 aa, Arabidopsis thaliana
MGVGGNFWDLLRPYAQQQGFDFLRNKRVAVDLSFWIVQHETAVKGFVLKPHLRLTFFRTINLFSKFGAYPVFVVDGTPSPLKSQARISRFFRSSGIDTCNLPVIKDGVSVERNKLFSEWVRECVELLELLGIPVLKANGEAEALCAQLNSQGFVDACITPDSDAFLFGAMCVIKDIKPNSREPFECYHMSHIESGLGLKRKHLIAISLLVGNDYDSGGVLGIGVDKALRIVREFSEDQVLERLQDIGNGLQPAVPGGIKSGDDGEEFRSEMKKRSPHCSRCGHLGSKRTHFKSSCEHCGCDSGCIKKPLGFRCECSFCSKDRDLREQKKTNDWWIKVCDKIALAPEFPNRKIIELYLSDGLMTGDGSSMSWGTPDTGMLVDLMVFKLHWDPSYVRKMLLPMLSTIYLREKARNNTGYALLCDQYEFHSINEPEESIVVLEEEEESVDPLDGLNEPQVQNDNGDCFLLTDECIGLVQSAFPDETEHFLHEKKLRESKKKNVSEEETATPRATTMGVQRSITDFYRSAKKAAAGQSIETGGSSKASAEKKRQATSTSSSNLTKSVRRRLLFG

SEQ ID NO: 788 - DNA, 1890 bp, Oryza sativa
atgggggtggggggaagcttctgggacctgctcaagccgtacgcgcggcacgagggcgcggggtacctccgcggccgccgcgtcgccgtcgacctctccttctgggtcgtctcccacagcgccgccatccgggcgcgctcgccgcacgcgcgcctcccccatctccgcaccctcttcttccgcaccctctccctcttctccaagatgggtgcttttcctgtgttcgtggtggacggccagccgtcgccgctcaagtcgcaggtgagggccgcgcgattcttcagaggatctggaatggacctcgctgcgctgccgagcacggaggcggaggccagtgcggatgcgctggttcaaccgaggaatgccaagttcacgcgatacgtggaggattgcgtggaactgcttgaatatcttggaatgcctgtgctgcgggcaaaaggtgaaggtgaagctctttgtgctcagttgaataatcaaggccatgtagatgcttgcatcacttcagacagtgacgctttcctctttggggctaagactgtcataaaggttctccgatcgaattgtaaggaaccttttgagtgctacaacatggcagacattgagtctggtcttggactaaagaggaaacaaatggtagcaatggcacttcttgttggcagtgaccatgacttgcatggtgtgcctggttttggtcctgagactgcacttcggtttgtgcagttatttgatgaagataatgttctagctaaattatatgaaattggtaaaggggtctatccatttataggagttagtgcgcccaatattgatgatctcccatcaccctccacaaagagtctaccgcgtgcgcgatcaccgcactgctcacattgtggtcaccctggcaacaagaaaaatcatatcaaggatgggtgcaacttttgcttggttgattcattagagaattgtgtggagaagccagctggattcatatgtgaatgtcctagttgtgacaaggcacgtgatctgaaggtgcagagaagaaatgaaaactggcaaatcaaggtctgtaaaaggatagctgctgagactaactttccaaatgaggagatcattaacttgtacttgaatgatgacaatttggataatgaaaatggtgttccattgcttacatggaataaacctgatatggagattttggttgacttcttatctttcaagcagaactgggagccagcgtatattcgtcagcggatgcttcctatgctatcaaccatatatttacgcgaaatggcttcatctcaatctaaatcatttcttctttatgatcaatataaatttcattcaatccaacggattaagataagatatggtcacccatattacttggtcaagtggaagagagtcactcgtagtatgatatccaatgatccacctagcaagcagacagaattggaggggaagaatgataaggtggaggtattggatggagatgatgaggtagtagatgaagaggaggaggagcctacaatgatttccgaaactactgaactgctagatgagccagatgttccacaagtactggatgatgataaagattgctttttattaactgatgaagacattgagctagtgaatgctgcatttcctgatgaagcacaaagatttcaggaagaacagaggctgaaagaagcaaagtcaatagcacggaaatccaagctcaacgtggcaggtttcgaaacaccaaaaggtccaaggcctagtggagttcagcttagcatcaaggagttctaccgctccaagaaagggctgagtggcgactcagggaaggacggctcaagaaaatcctccgatgtggacctcagcaagaacttgcccaagtctgtccgacgacgcctcctcttcgactga

SEQ ID NO: 789 - protein, 629 aa, Oryza sativa
MGVGGSFWDLLKPYARHEGAGYLRGRRVAVDLSFWVVSHSAAIRARSPHARLPHLRTLFFRTLSLFSKMGAFPVFVVDGQPSPLKSQVRAARFFRGSGMDLAALPSTEAEASADALVQPRNAKFTRYVEDCVELLEYLGMPVLRAKGEGEALCAQLNNQGHVDACITSDSDAFLFGAKTVIKVLRSNCKEPFECYNMADIESGLGLKRKQMVAMALLVGSDHDLHGVPGFGPETALRFVQLFDEDNVLAKLYEIGKGVYPFIGVSAPNIDDLPSPSTKSLPRARSPHCSHCGHPGNKKNHIKDGCNFCLVDSLENCVEKPAGFICECPSCDKARDLKVQRRNENWQIKVCKRIAAETNFPNEEIINLYLNDDNLDNENGVPLLTWNKPDMEILVDFLSFKQNWEPAYIRQRMLPMLSTIYLREMASSQSKSFLLYDQYKFHSIQRIKIRYGHPYYLVKWKRVTRSMISNDPPSKQTELEGKNDKVEVLDGDDEVVDEEEEEPTMISETTELLDEPDVPQVLDDDKDCFLLTDEDIELVNAAFPDEAQRFQEEQRLKEAKSIARKSKLNVAGFETPKGPRPSGVQLSIKEFYRSKKGLSGDSGKDGSRKSSDVDLSKNLPKSVRRRLLFD

SEQ ID NO: 790 - DNA, 1875 bp, Populus trichocarpa
atgggtgtgggaggcaaattctgggatttactgaaaccctacgcgcgacatgaaggacccgatttcttgagagaaaagcgggtcgcagtggatctttcttattggattgtccaacatgaaacagctatcaaggcaacccatgttcggaaacctcatcttcgtctcactttcttccgtactatcaatctcttctccaagtttggagcgcttcccgtatttgttgttgatgggactccgtcgccattgaagtctaaagcaaggatagcgaggttttttcggttttcgggggttgatgtttcgggtttgccagtggctgaaggtgtttcggcggagaggaacaagacttttctcaaatgcgttcaagagtgtgtggaactgcttgaactgtttgggatgcctgttttaaaggccaatggtgaagctgaagcactgtgtgctcagttaaatgctgaaggccttgtggatgcgtgtattacagctgatagtgatgctttcctttttggggctaagtgtgtgataaaatgcgtcaagcctaataccaaagaaccatttgaatgctaccatatatcagatgttgaagctggtcttgggttgaagaggaaacacttgatagccatttccctcttggttggcaatgatcatgatcttaatggtgtgcaagggattgggcttgagaaggctcttcgttttgtccaaagtttcagtgaagatgagatattgaatcagttacatgaaatcagcaacgggaactctccttcacttcaaattgtttcaaaagttgtagatgaaataattctttgtccagatgaaagcccagcaaggtcgaaaacttctcattgctccttctgtgggcatccaggcagcaaaagagcacatttcaagtcatcttgtgaatattgtgggactagtaccagtcagggttgcataagaaaggcagagggttttaagtgtaattgctcctcctgtaataaggatcgaaaagaaaaggagcagcaaaagcatgaaaattggcacataaaagtttgcaacaagatatccacggagccaaactttccaaatgatgatattattcgaatgtatttgtgcaacaaacatggaaactttactggtattggcagcatgatgaggattgcatctggcgatggcttgtgtttatcatggagatgcccagacactgaaatactagttgatttcttggattttcatcagcattgggaaccatcttatgttcgacagagaatgcttcccatgttgtccaccatatatttgagagaaatggctgccaagcctgagaaaactatgttgtatgggcagtatgtatttgattctattcagcgtgtgaaaataagatatggacaccaatcttatgtgatcaggtggagaaaagtgacaagtacagctggcagtattgtccgtaccaactctgttgaagagtctgacaagcctcaagaagagatcgttgaaattgatgaattcattgatcatttggatgaggatactgccccccagattcatattgatgatgagtgttgcttcctgttgacagatgaaaatatggagcttattcgtgttgcttttccagaagaagttgaaagattttggcatgagaaggaactgaaagcatcgaaaagaagaaagggttcaggctttaaaaatgaagggtccagtgaaaagtcagaatcaccaaagtcaaaacgtgtccaacttagattaacagaattttaccgctctgctaaggtagcagcaattcacgcaaaacaaggagatctagccaataattctgaaaatcaagaggatgggccatcaaaagggaagaccaaggtttcaagttcaaaccttccaaagtctgtgagacgccgccttctgtttgagtag

SEQ ID NO: 791 - protein, 624 aa, Populus trichocarpa
MGVGGKFWDLLKPYARHEGPDFLREKRVAVDLSYWIVQHETAIKATHVRKPHLRLTFFRTINLFSKFGALPVFVVDGTPSPLKSKARIARFFRFSGVDVSGLPVAEGVSAERNKTFLKCVQECVELLELFGMPVLKANGEAEALCAQLNAEGLVDACITADSDAFLFGAKCVIKCVKPNTKEPFECYHISDVEAGLGLKRKHLIAISLLVGNDHDLNGVQGIGLEKALRFVQSFSEDEILNQLHEISNGNSPSLQIVSKVVDEIILCPDESPARSKTSHCSFCGHPGSKRAHFKSSCEYCGTSTSQGCIRKAEGFKCNCSSCNKDRKEKEQQKHENWHIKVCNKISTEPNFPNDDIIRMYLCNKHGNFTGIGSMMRIASGDGLCLSWRCPDTEILVDFLDFHQHWEPSYVRQRMLPMLSTIYLREMAAKPEKTMLYGQYVFDSIQRVKIRYGHQSYVIRWRKVTSTAGSIVRTNSVEESDKPQEEIVEIDEFIDHLDEDTAPQIHIDDECCFLLTDENMELIRVAFPEEVERFWHEKELKASKRRKGSGFKNEGSSEKSESPKSKRVQLRLTEFYRSAKVAAIHAKQGDLANNSENQEDGPSKGKTKVSSSNLPKSVRRRLLFE

SEQ ID NO: 792 - DNA, 1773 bp, Sorghum bicolor
atgggcgtggggggcagcttctgggacctgctcaagccctacgcgcggcacgagggcgcggggtacctgcgcggtcgccgagtcgccgtcgacctctccttctgggtcgtctcccacagcaccgccatccgggcgcgcttgccccgggcgcggagcccgcacctccggaccaccttcttccgcaccctctccctcttcgccaagatgggcgcgttccctgtgttcgtggtggacggcgagccgtcaccgctcaagtcgcaggcgagggctgcgcgcttcttccgaggctctgggatggacctggccgcgttgcctagcacagagacggagtccagtgcggccgcggcaccggtcaaaaggaggaatgctgcattcacgcgatgcgttgaggagtgcgtggaactgcttgaatatcttggaatgcctgtattgagggcaaaaggtgaagctgaagccctttgcgcacagctgaataatgaaggtcatgtagatgcttgcattactgcagacagtgatgctttcctctttggggctaagactgtcgtaaaggtcttcagatcgaattgcaaggaaccttttgagtgctaccacatagcagacattgagtctggtcttggattaaagaggaagcaaatggtggccatggcgctccttattggcagtgaccatgatttgcatggggtgcctggttttggcctggagactgcacttcgttttgtgcagttatttgatgaagatgaaattttagataagctacatgaaattggtagaggggtttatccattcctagaaggatttgacaatgcacatattgatgatctcccatcatcgtccacaaaaagcccagttgcaaaatcaccgcactgctcacattgtggtcacccgggcagcaagaaaaatcatagcaaggacgggtgcaattattgcttggtggattcattagagaattgtgtggaaaaaccagctggattcaaatgtgaatgtcctagctgtgacgaggcacgtgatctaaaggaacaaagacggcatgaaaattggcaaatcaaggtctgcaaaagaatagctgctgagacaaattttcctaatgaggagatcattaaattgtatctaagtgataataatctggttgaagaggtggcatcatctccatctacaccattgcttctttgtgatcaatatgaatttgattcaattcaacggattaaaataaggcatggtcacccttattacttggtgaaatggaagagagctacccgtggtatgaatactgatatgtccagcaagaagccagtaacggagggagagacaagtagcgatgtagcggtgttggatgaagatgacgatgaggatacagtggtttgcgagtcccctgagttactagatgaacctgatgttccacaagtgcttattgatgatggctgcacctttctattgacggatgaagacattcaacttgttggtgctgcttttcctaaggaaacagcaaggtttcaggaagaacagaggctgaaagaagcaagatcaagatcacgaaaatccaaatcaagcctagcagatactgcatgcgaaacacctaaaggtccgagacctagcggagtgcagcttagcatcacagagttctaccgctcgaagaaagggcagaacgcagagtctgggaagaaaccggctggagaagggcaagcctcgaaggaaggctcaagaaaatcctctgacagggacctcaacaaggacctgccaaagtctgttcgacgccgcctcctttttgatcattga

SEQ ID NO: 793 - protein, 590 aa, Sorghum bicolor
MGVGGSFWDLLKPYARHEGAGYLRGRRVAVDLSFWVVSHSTAIRARLPRARSPHLRTTFFRTLSLFAKMGAFPVFVVDGEPSPLKSQARAARFFRGSGMDLAALPSTETESSAAAAPVKRRNAAFTRCVEECVELLEYLGMPVLRAKGEAEALCAQLNNEGHVDACITADSDAFLFGAKTVVKVFRSNCKEPFECYHIADIESGLGLKRKQMVAMALLIGSDHDLHGVPGFGLETALRFVQLFDEDEILDKLHEIGRGVYPFLEGFDNAHIDDLPSSSTKSPVAKSPHCSHCGHPGSKKNHSKDGCNYCLVDSLENCVEKPAGFKCECPSCDEARDLKEQRRHENWQIKVCKRIAAETNFPNEEIIKLYLSDNNLVEEVASSPSTPLLLCDQYEFDSIQRIKIRHGHPYYLVKWKRATRGMNTDMSSKKPVTEGETSSDVAVLDEDDDEDTVVCESPELLDEPDVPQVLIDDGCTFLLTDEDIQLVGAAFPKETARFQEEQRLKEARSRSRKSKSSLADTACETPKGPRPSGVQLSITEFYRSKKGQNAESGKKPAGEGQASKEGSRKSSDRDLNKDLPKSVRRRLLFDH

SEQ ID NO: 794 - DNA, 1938 bp, Vitis vinifera
atgggggtgggagggagtttttgggaattactgaaaccctatgcccgacctgaaggcttcgattacatccgaaacaaacgggtggctgtggatctctctttctggatagtccaacaagaaaccgccactaaagccaatgttcggaaccctcacctcagactcactttcttccgtacgataaatctcttctccaagtttggcgcgtttccggtgtttgttgtggatggaactccgtcgcccttgaaatctcaggcaaggattgcacggttcttccgtggttctggaattgatttgtcgggtttgccggtggttgaggagggtgtttcggtggaaaggaatgccgaattctcaagacgcgttcaagagtgtgttgaactgcttgaacttcttggtattcctgtactgaaagcaagagaagaggctgaagctctttgtgcccagttaaatagtgaaggccatgtagatgcttgcatcacagctgacagtgatgcattcctctttggggctaaatgtgtgataaaatgcctccgacccaattgcaaggaacccttggaatgctaccacatgtcagatattgaatctggtcttggcctgaagaggaaacacttgatagccatctctcttttggttggcaatgactatgatttaaatggggtacaagggatcgggcttgacactgctgttcgttttgtccaaggctttagtgaagatgagattctgaataggttacaagaaaaaggcaatggggcaactgtgtttgatggggctgttaaatctatggatgattctattccctatgagaggtcaccaaggccaaaagttcctcattgttccatctgtgggcatccaggtcgcaagaaatctcatctcaagttttcttgtgatttttgtggcacctttcctaggaggggctgcttggaaaaaccagaggggtttgtatgtgattgctccacctgtgacatggatcgaaaagaaaaggcacagaagaagcaagaaaattggcagttaagggtttgcaaaaagattgccatggagcagaatttcccaaataatgagattattgaattgtatttgagcaataaccatgggcattttactgaaaaggatggacctcatatatcatgggaaagcccaaaaacagaggtgcttgttgatttcttagcttatcatcagcattgggagccgtcttatattcgtcaaaggatgcttcctatgttgtctaccatcttcttccgagaaaaggctttgaatccaacgaatacattgctatatgggcagtatgagtttgattctattcagcgtgtgaaggtaaggttcgggcatcaattttttgtggtcaaatggaagaaggctgtacatgcaatggctagtgttgcctatacaatccctggtgactctgatatagagcaagagaagctaacagaagttgatgaatccattgatctattggatgagtgcaatgttcctcagattcacgttgatgatgggtgctggtttttgttgactgatgaaaatatggacttagttcgggctgcttttccagaggaagttaacagatttctgctggaaaaggaactgaaagaatcaaaaagaagaaataagtctggtttaagatctgaaggggtggaagaaatgccagattcgccaaaatcaaaaggagtccagctaagtattactgaattttaccgttcagcaaaagtaatttttcatgaaaaaccagaagattcagctgggaattcagatgcccagggtagagagacctcaactgaaaagagaaaagcctcggattcaaagctttccaagtctgtaagacgacgccttttgtttggttagggtgtgatggtatttctactattgggaaatttgcttttgtttggttaacatgtaaatttgattcacttgtagccctcgaatcttgttcagctgtgcatagtctgg

SEQ ID NO: 795 - protein, 610 aa, Vitis vinifera
MGVGGSFWELLKPYARPEGFDYIRNKRVAVDLSFWIVQQETATKANVRNPHLRLTFFRTINLFSKFGAFPVFVVDGTPSPLKSQARIARFFRGSGIDLSGLPVVEEGVSVERNAEFSRRVQECVELLELLGIPVLKAREEAEALCAQLNSEGHVDACITADSDAFLFGAKCVIKCLRPNCKEPLECYHMSDIESGLGLKRKHLIAISLLVGNDYDLNGVQGIGLDTAVRFVQGFSEDEILNRLQEKGNGATVFDGAVKSMDDSIPYERSPRPKVPHCSICGHPGRKKSHLKFSCDFCGTFPRRGCLEKPEGFVCDCSTCDMDRKEKAQKKQENWQLRVCKKIAMEQNFPNNEIIELYLSNNHGHFTEKDGPHISWESPKTEVLVDFLAYHQHWEPSYIRQRMLPMLSTIFFREKALNPTNTLLYGQYEFDSIQRVKVRFGHQFFVVKWKKAVHAMASVAYTIPGDSDIEQEKLTEVDESIDLLDECNVPQIHVDDGCWFLLTDENMDLVRAAFPEEVNRFLLEKELKESKRRNKSGLRSEGVEEMPDSPKSKGVQLSITEFYRSAKVIFHEKPEDSAGNSDAQGRETSTEKRKASDSKLSKSVRRRLLFG

SEQ ID NO: 796 - DNA, 2181 bp, Drosophila melanogaster
atgggcgtcaaggaattatggggtgttttaacgccccattgtgaacgtaaacccattaatgaactgcggggaaagaaagtggccatcgacctggccggctgggtgtgcgaatctcttaatgttgtggactactttgtgcatccaaggcatcatttaaagaacctcttctttcgcacttgctacttgatttgggagcaagttactccggttttcgttttggagggagttgctccaaaactcaagagccaggtgatagccaaaaggaatgagctccagtttcggggagtgaagcccaagaattcgcctgagtgcacccaaagtcagccgtccaagggcgacaagggacgcagccggttcaaccatgttctcaagcagtgcgaaacgctgctgctctccatgggaatccagtgcgtccaaggtcccggcgaggcggaggcctactgtgcctttctcaacaagcatggcctagtggacggcgtcattagccaggactcggattgctttgcctatggagccgttcgtgtctatcgcaacttctccgtttccacccaaggagcccaggcagccgccggcggagctgtggacatctacgacatgcgggagatcacatcccgaatggactttggccaacagaagatcattgtgatggctttgctctgcggctgtgattattgtcctgatggcataggtggcattggcaaggatggcgtcctaaagctgttcaacaagtacaaggagactgagattttggatagaatgagaagctggcgtggtgaaaccgataaatacaatgccttggagatccgagtggacgacaaatccatctgcagcaattgtggccacattggcaagacccagagccacacaaaaagtggctgcagtgtgtgtcgcacacacaaaggctgcgatgagagtctctggaaagaacaacgactatccattaagtccgagttgactttgaggcggaaagccctattatctcctgactttcccaacgaagagatcattgccgagtttctcagcgaacccgacaccattcccaatctaaatctcaactggcggcaaccaaatcttgtcaaattcatcaaacaaatcggacatctcttgcagtggccagaaatatactgcttccaaaagttctttcccatactcacacgctggcaggtgcagcaatcgaagcaggagaagatacttatccagccacacgagattatcaaaaagcgaactgtgaagggtgtgcccagcttagaattgcgctggcacgatcccagtggcatcttcaagggtcttattccggacaagcagattgcggagtacgaagcggagcatcccaagggaatcgaggaactttactacaccattgagccattggacatgctggagacagcgtatcccgatttagtagcggcctttttgaagtcgaaggagaagcccgccaagaaaaccacgcgaaagaagaaaaccgcatctgaagaggagaataaggaaaacgagccgaattcgaaaccaaagcgagtggtcagaaagataaaggctcagcctgaagagaaccagccattactgcaccaattcctagggcgcaagaaggaaggtactccggtcaaggctcccgctccgcaacgtcagcaatgctccacccccatcaccaagttcctgccctccgatctggaaagcgattgcgatgccgaagagttcgatatgtcggacatagttaaaggcattatctcgaatccgaatgccaagccagcactgaccaaccacgatggtcaccagcttcattacgaacccatggcggaagatttgagcttacgtctggcgcagatgagtctaggaaatgtgaatgaatcgcccaaagtggaaacgaaaagagatctctctcaagtggatcaactaccgcagagtaagcgattctccttggaggacagttttgatctgctggtcaagggagatctgcagaagctggccaggacgccagtggagcgattcaagatgcagcatcgcatcagcgaaaagattccaacgccagtgaagcccttggataacataagttacttcttcaatcaaagttccgataatgcggatgtctttgaagagttgatgaactccagcttggtgccccaggatcaagaggataacgcagaagatgaggaggaggatgacctggtagtgattagtgattaa

SEQ ID NO: 797 - protein, 726 aa, Drosophila melanogaster
MGVKELWGVLTPHCERKPINELRGKKVAIDLAGWVCESLNVVDYFVHPRHHLKNLFFRTCYLIWEQVTPVFVLEGVAPKLKSQVIAKRNELQFRGVKPKNSPECTQSQPSKGDKGRSRFNHVLKQCETLLLSMGIQCVQGPGEAEAYCAFLNKHGLVDGVISQDSDCFAYGAVRVYRNFSVSTQGAQAAAGGAVDIYDMREITSRMDFGQQKIIVMALLCGCDYCPDGIGGIGKDGVLKLFNKYKETEILDRMRSWRGETDKYNALEIRVDDKSICSNCGHIGKTQSHTKSGCSVCRTHKGCDESLWKEQRLSIKSELTLRRKALLSPDFPNEEIIAEFLSEPDTIPNLNLNWRQPNLVKFIKQIGHLLQWPEIYCFQKFFPILTRWQVQQSKQEKILIQPHEIIKKRTVKGVPSLELRWHDPSGIFKGLIPDKQIAEYEAEHPKGIEELYYTIEPLDMLETAYPDLVAAFLKSKEKPAKKTTRKKKTASEEENKENEPNSKPKRVVRKIKAQPEENQPLLHQFLGRKKEGTPVKAPAPQRQQCSTPITKFLPSDLESDCDAEEFDMSDIVKGIISNPNAKPALTNHDGHQLHYEPMAEDLSLRLAQMSLGNVNESPKVETKRDLSQVDQLPQSKRFSLEDSFDLLVKGDLQKLARTPVERFKMQHRISEKIPTPVKPLDNISYFFNQSSDNADVFEELMNSSLVPQDQEDNAEDEEEDDLVVISD

SEQ ID NO: 798 - DNA, 2727 bp, Homo sapiens
atgggagtgaatgacttgtggcaaattttggagcctgttaagcaacacatccccttgcgtaatcttggtgggaaaaccattgcagttgatctgagtctctgggtgtgtgaggcacagacagtcaaaaaaatgatgggcagcgtcatgaagccccacctcaggaacttattttttcgtatctcatatttaacacaaatggatgtaaaactggtatttgttatggaaggggaaccaccaaagctgaaagctgatgtcataagcaagaggaatcagactcggtatgggtcttctggaaaatcgtggtctcagaaaacagggagatcacattttaaatcagtcttaagagagtgcctccatatgctcgaatgcttaggaatcccctgggttcaggctgctggggaagctgaagccatgtgtgcttatctcaatgctggtggtcatgtcgatggctgcctcaccaatgatggagatactttcctttatggggcccagactgtttacaggaatttcactatgaatacaaaggacccacatgttgactgttacacaatgtcatctatcaagagtaaactaggtttggatagagatgctctggttggattagcaatacttcttggctgtgattatctcccaaagggagtccctggagttggaaaagagcaagcattaaaacttatacagattttgaaagggcaaagtttacttcagaggtttaatcggtggaatgaaacatcttgtaactctagtccacaactgctagtcactaaaaaactggctcattgttccgtatgttcccatccaggttcacctaaggatcatgaacgtaatggatgcagattatgtaaaagtgataaatattgtgagccacatgactatgaatactgctgtccttgtgagtggcaccgtacagaacatgataggcaactcaatgaagtagagaacaatattaagaagaaagcttgctgttgtgagggattcccattccatgaggttattcaagaattccttttaaacaaggataaattggtgaaggttatcaggtaccaaagacctgatttgttattgtttcagagatttactcttgaaaaaatggagtggcccaatcactatgcatgtgagaaattgctggtacttttgacccattatgacatgatagaaagaaagcttggtagcagaaactctaatcaactacagccaattcgaattgttaagactcgaatcagaaatggagttcattgttttgaaatagaatgggaaaagcctgaacattatgctatggaagataaacaacatggagaatttgctttattaacaattgaggaagaatcattgtttgaagcagcatatcctgagatcgttgctgtttaccaaaaacaaaagttagaaattaaagggaagaaacaaaaacgtattaagcctaaagaaaacaatttgccagaaccagatgaagtaatgagctttcagtcacacatgactttaaaacccacatgtgaaatctttcataagcagaattccaagttaaattcggggatttcccctgatcctacattaccacaggaatctatttctgcctcattgaatagcttgcttttacctaaaaatactccatgtttgaatgcacaagaacagttcatgtcttctctaagacctttggctatacagcaaattaaagctgtcagtaagtctctaatttcagaatctagtcaacccaatacctcatctcataatatatccgtgattgctgatctacacttgagcactattgactgggaaggtacttcttttagtaattctccagctattcaaaggaatactttttctcatgatttaaaatcagaagttgaatcagagctatcagccatccctgatggctttgaaaatatcccagaacaactgtcctgtgaatcagaaaggtacactgcaaacataaagaaagtgttggatgaggattctgatgggattagtcctgaggagcatctactttctggcattactgatttatgtcttcaggatttgcctttaaaggaacgaatatttataaaattatcatatcctcaggataatctacaaccagatgtcaacctgaaaactttgtccatacttagtgtaaaagaatcttgtattgctaacagtggttctgattgtacatcacatctttcaaaggatcttccaggaattcccttgcaaaatgaatccagagactctaaaattctaaaaggagaccagctgcttcaagaagactataaagtcaatacttctgtcccttattctgtcagtaacacagtggtaaagacctgcaatgttagaccaccaaatactgctttagatcatagtagaaaagttgatatgcaaaccactcggaaaattttaatgaagaagagtgtttgccttgacagacattcctctgatgaacaaagtgccccagtgtttgggaaagctaagtacacaactcaaagaatgaagcacagttctcaaaagcataattcatcccatttcaaagaaagtggccataacaagttgagtagccctaagatacatattaaagaaactgaacagtgtgtcagatcttatgaaacagctgaaaatgaagaaagctgtttcccagattcaacaaaaagttctctgagttctctacaatgtcataagaaagaaaacaactctggtacttgtttggatagccctcttcctttatgccagagattaaaactaagattccaaagcacttga

SEQ ID NO: 799 - protein, 908 aa, Homo sapiens
MGVNDLWQILEPVKQHIPLRNLGGKTIAVDLSLWVCEAQTVKKMMGSVMKPHLRNLFFRISYLTQMDVKLVFVMEGEPPKLKADVISKRNQTRYGSSGKSWSQKTGRSHFKSVLRECLHMLECLGIPWVQAAGEAEAMCAYLNAGGHVDGCLTNDGDTFLYGAQTVYRNFTMNTKDPHVDCYTMSSIKSKLGLDRDALVGLAILLGCDYLPKGVPGVGKEQALKLIQILKGQSLLQRFNRWNETSCNSSPQLLVTKKLAHCSVCSHPGSPKDHERNGCRLCKSDKYCEPHDYEYCCPCEWHRTEHDRQLNEVENNIKKKACCCEGFPFHEVIQEFLLNKDKLVKVIRYQRPDLLLFQRFTLEKMEWPNHYACEKLLVLLTHYDMIERKLGSRNSNQLQPIRIVKTRIRNGVHCFEIEWEKPEHYAMEDKQHGEFALLTIEEESLFEAAYPEIVAVYQKQKLEIKGKKQKRIKPKENNLPEPDEVMSFQSHMTLKPTCEIFHKQNSKLNSGISPDPTLPQESISASLNSLLLPKNTPCLNAQEQFMSSLRPLAIQQIKAVSKSLISESSQPNTSSHNISVIADLHLSTIDWEGTSFSNSPAIQRNTFSHDLKSEVESELSAIPDGFENIPEQLSCESERYTANIKKVLDEDSDGISPEEHLLSGITDLCLQDLPLKERIFIKLSYPQDNLQPDVNLKTLSILSVKESCIANSGSDCTSHLSKDLPGIPLQNESRDSKILKGDQLLQEDYKVNTSVPYSVSNTVVKTCNVRPPNTALDHSRKVDMQTTRKILMKKSVCLDRHSSDEQSAPVFGKAKYTTQRMKHSSQKHNSSHFKESGHNKLSSPKIHIKETEQCVRSYETAENEESCFPDSTKSSLSSLQCHKKENNSGTCLDSPLPLCQRLKLRFQST

SEQ ID NO: 800 - DNA, 1521 bp, Arabidopsis thaliana
atggcttcgagtctgggcggcgatgagagaagcgagatagcgtttttcgaccttgagacggcggttccgaccaaatcaggggagcctttcgcgattttggagtttggggccatcttagtttgcccaaggaggctagaggagctctatagttactccactttggttcgacctactgatctttccttaatctctacgctcacaaagcgacgtagcggcattacgcgcgacggagttctctctgcacatacattctctgaaatcgccgataaggtctatgacattcttcacggacgaatttgggcgggacataacataattcgattcgattgtgtaagaataagagaagcatttgcagaaattggtctctctccgccagagccgaaagctacaattgattcgctttcattgttgtctcagaagtttgggaagagagctggtgacatgaagatggcatcacttgctacatacttcgggctaggagatcaagctcacaggagcttagatgatgtccggatgaatcttgaagttgtcaagtactgtgcaaccgtcttgtttctggagtccagtgttcctgacattcttacagacatgagctggttttccccacgaaaaagtcccagaacacgaagtaatgggaagttagtggctaatggagtcagagaaagctcgacttcttcctcctcgagtcctaaaactgatccgagttcctcttccgtggacgccacaatcgtcaaaaaccatcccatcgtttctcttcttacggaatgctcagaaagtgatgcatcaagttatgatatagaagatccaattgatataaccactttaataggtaaactacgtattggaactcttcagacggatgctgcagaagaagcgaaaactgtaagacagcaggatgaatcacctccatcacccgattccgatgccaaagatgaatcatttttgggtgttaatgaagtatctgtttctagcatcagggcaagtcttgtcccgttttatcgtgggagcttgagaatgaagctatttcacaacgacacccctctgcatctgtgttggcatagcttgaaagttcggttcggaataagccggaagtttgtggatcatgcaggtcgtccaaagttgaatattattgttgacgcccctcttgatctatgcaagatcttggacgcagttgatgctgctgcgcacaacttaccaactgactcaagcacaaactcagattggagacccactgttataaggaaagaaggctttgccaactatcccacagccagactgcatataagctcagaatccaacggagatgataccctgtgtggaacgcaggtatatcaaaaagaagaacctttgggaaccaatcaaaagctcgatgtcagtagcgataacttggaaaagcttgagtcagcattacttcccggtactctggttgatgcattcttctcactcgagccttacagttatcagcaaatggcagggatacgtctagcagtcaaaaagttggtgatcctcctgaaaaagtga

SEQ ID NO: 801 - protein, 506 aa, Arabidopsis thaliana
MASSLGGDERSEIAFFDLETAVPTKSGEPFAILEFGAILVCPRRLEELYSYSTLVRPTDLSLISTLTKRRSGITRDGVLSAHTFSEIADKVYDILHGRIWAGHNIIRFDCVRIREAFAEIGLSPPEPKATIDSLSLLSQKFGKRAGDMKMASLATYFGLGDQAHRSLDDVRMNLEVVKYCATVLFLESSVPDILTDMSWFSPRKSPRTRSNGKLVANGVRESSTSSSSSPKTDPSSSSVDATIVKNHPIVSLLTECSESDASSYDIEDPIDITTLIGKLRIGTLQTDAAEEAKTVRQQDESPPSPDSDAKDESFLGVNEVSVSSIRASLVPFYRGSLRMKLFHNDTPLHLCWHSLKVRFGISRKFVDHAGRPKLNIIVDAPLDLCKILDAVDAAAHNLPTDSSTNSDWRPTVIRKEGFANYPTARLHISSESNGDDTLCGTQVYQKEEPLGTNQKLDVSSDNLEKLESALLPGTLVDAFFSLEPYSYQQMAGIRLAVKKLVILLKK

SEQ ID NO: 802 - DNA, 711 bp, Arabidopsis thaliana
atggcggtccaaacatttcccaacgaaatcgtcttcttcgatctagaaacaaacgtaccaaacaaagcagggcaacattttcacatactagagtttggggcgatcatcgtatgtccaaaaaaactcgaggagctagagagcttcacaacgcttatacaacctaaagacttgtcggtggtctcaataaggtcgtctaggtcagatgggatcaccagggctaaggttacgaacgcaccaagttttgaagacgtggctgagaaaatccatggtttgttgaacggtaggatttgggcaggtcataacattagaagatttgattgcgttaggatcaaagaagctttcgctgagatcggtaaagctgcgcctgaaccctcagggatcattgattctttggggttattaagtgacaagtttggcaaaagagctggtaacatgaagatggcaagtttggctgcctattttggtcttggagttcaaaagcacaggagtctcgatgatgttcgaatgaatttagaggtcctcaagcattgtgcaacagtgcttttcttggaatctacacttcccaatcatttggaaggaaaatggcacacttcttctaagattatgacaagaagtcgaaggaattaccaaatagcccaaagggcaatgccttactcgaagggtagtctcgagaaggtaattgtgtttttttcccctctcttcaaatcataa

SEQ ID NO: 803 - protein, 236 aa, Arabidopsis thaliana
MAVQTFPNEIVFFDLETNVPNKAGQHFHILEFGAIIVCPKKLEELESFTTLIQPKDLSVVSIRSSRSDGITRAKVTNAPSFEDVAEKIHGLLNGRIWAGHNIRRFDCVRIKEAFAEIGKAAPEPSGIIDSLGLLSDKFGKRAGNMKMASLAAYFGLGVQKHRSLDDVRMNLEVLKHCATVLFLESTLPNHLEGKWHTSSKIMTRSRRNYQIAQRAMPYSKGSLEKVIVFFSPLFKS

SEQ ID NO: 804 - DNA, 1407 bp, Arabidopsis thaliana
atggatccagaggataggtccgagattgccttcttcgacgttgagacgactgtaccaaaacgaggtcaacgtttcgcgattctagaattcgggtcaatcctcgtttgcccgaagaagctaacggagctccgaagctacacgactctcgtccaacctgcagatttgagtctcatatcttccttgtccgtgaggtgcaatggtatcaaacgtgacgacgtcgttttggcacctctgtttgccgacatcgctgatactgtctacgacattctccatgggaggatttgggcaggtcataacatattgaggtttgattgtgcaaggatcagagaagcatttgcagagattggtcgtcaaccacccgagccaaaaggcgccattgattcattgggtttgctaactcagaagtttggtagaagagctggtgatatgaagatggcaactttggctagatatttcggactcgggaatcagacgcataggagcctggatgatgttcgaatgaatcttgaggttctcaaatattgtgctactgtcttgttcttggagtcgagtctcccatatgcacatgtagataattcggtatctcctgaaactattagttcaaggagacgtattgatgcatctcgcgagggtaatactgtaacgacctctgttaggctaccatccattagcgagaacagtgcagctcagccagatccgttcaacatgagcgtcttgaggaatgaaatggcttctgacaaccatattcaatcagacattctcatggaagaagaacaaattgaaccctctgatgttgtcgcctctgagaataccagtgaccatgagggtttcttgacgcctgacgcgatgtctctttcaaacatcaaagcgatgctcttcccgttttatcctggaagccaaatgatgaaactaaagctactccacggcgattcccctctgcagctctactgttcttatctgaaaatacggtttggagtcaatgggaagtttctggataacaccgggagacggaggttaaactttgttgttgatctgaatccaagcctttacagtatactcgaagcatgtgacagtaatgcgcagaaactatctgttgattcaggttccacttctgagtggaacccggtcgtgaatccaatgaagggatttgttaactaccctaacgcaaggatacatattgcgacagagataaatggagatgaagctcggtatgcaacagagatacaccaaagagagtcctctggagctactcagaaactaatcttcagcaacccgaacaatgaggagctcgaatcgttgctgaccacgggaagtgttgttgatgcattcttgtctcttgaaccgtatgattatcagcagaaagctggaatccgccttgttgccaaaaagctagtcattcagtcgtaa

SEQ ID NO: 805 - protein, 468 aa, Arabidopsis thaliana
MDPEDRSEIAFFDVETTVPKRGQRFAILEFGSILVCPKKLTELRSYTTLVQPADLSLISSLSVRCNGIKRDDVVLAPLFADIADTVYDILHGRIWAGHNILRFDCARIREAFAEIGRQPPEPKGAIDSLGLLTQKFGRRAGDMKMATLARYFGLGNQTHRSLDDVRMNLEVLKYCATVLFLESSLPYAHVDNSVSPETISSRRRIDASREGNTVTTSVRLPSISENSAAQPDPFNMSVLRNEMASDNHIQSDILMEEEQIEPSDVVASENTSDHEGFLTPDAMSLSNIKAMLFPFYPGSQMMKLKLLHGDSPLQLYCSYLKIRFGVNGKFLDNTGRRRLNFVVDLNPSLYSILEACDSNAQKLSVDSGSTSEWNPVVNPMKGFVNYPNARIHIATEINGDEARYATEIHQRESSGATQKLIFSNPNNEELESLLTTGSVVDAFLSLEPYDYQQKAGIRLVAKKLVIQS

SEQ ID NO: 806 - DNA, 1464 bp, Arabidopsis thaliana
atgttaacaatggttggtctaactccagctgaggatcgttcagagattgcctttttcgacgtcgagacgacaattccgttccgagttggtcaggggtacgcgattctggagtttggatcgattctggtttgccccaagaagcttgtggagctgaaaaactactctgttctggttcgtcctgctaatctcaacctcatcacgcctcggtccgtgaagtgcaacggcatcaaacgcgaagacgtcgaatcagctcttacctttgcagatatcgccgacaccgtctacgatattctccatggaaggatatgggcaggtcataacatattgaagttcgattgtccaaggataagagaagcatttgctgagattggacgagatccaccagagccaaagggcaccattgactccttggctttgcttactcaaaggtttgggagaagagctggtgatatgaagatggcgactttggctacatactttggacttggaaaccagacgcataggagtctggacgatgtaaggatgaacttcgaggttctcaagtattgtgccactgttttgttcttggagtcaagtcttccagatgaacttatagagaactcggttactactactactcctgaaactagttcaagaaggcgtaggactataaaaaaatctcctctgcaatctcccactgatcagcagacaggagagaacatgacaactatacctattttatcatttgtttcatccgcagaagctcaaacggatccatttgatatgagcactttgaggaacgaaatagcccctgaagttcttcaatcagatgttcccatggaagaagaacaaaatcagcagtctgagactgttgcctctgaaggtaccggtgaccaggaaggattcatggagctagataaaatatctgtttcaagtatcagagcaactcatgtcccgctatatgacgggagccaaacaatgaagctgcaactcttccttggggacagaccccttcagctccattgtcctcgtctgaaagtacggtttggaatcaatgggaaatttatggataaagctggaagacggaggttgaactttgtaattgatctgtatccaagtctctgcaacgtacttcaagaatgcgacagtgctgcacagacaatatctgttgattcaggcagtggttctgactggaaccctctagtcattccaatgaaaggatttctgaactgtcccactgcaaggatacatatacccacagagttaaatggagatatagatcggtacgcagctgagatacaccagaaagagttctctggagctactgctactcagaaactcatttctagcaaccccaaggctgaagagattgagtctttgttgaatccgagaactgttcttgacgctttcttgtctctggagccatatgattatcagcagagagccggaatccgtctagttgctagaaagcttgttatacattag

SEQ ID NO: 807 - protein, 487 aa, Arabidopsis thaliana
MLTMVGLTPAEDRSEIAFFDVETTIPFRVGQGYAILEFGSILVCPKKLVELKNYSVLVRPANLNLITPRSVKCNGIKREDVESALTFADIADTVYDILHGRIWAGHNILKFDCPRIREAFAEIGRDPPEPKGTIDSLALLTQRFGRRAGDMKMATLATYFGLGNQTHRSLDDVRMNFEVLKYCATVLFLESSLPDELIENSVTTTTPETSSRRRRTIKKSPLQSPTDQQTGENMTTIPILSFVSSAEAQTDPFDMSTLRNEIAPEVLQSDVPMEEEQNQQSETVASEGTGDQEGFMELDKISVSSIRATHVPLYDGSQTMKLQLFLGDRPLQLHCPRLKVRFGINGKFMDKAGRRRLNFVIDLYPSLCNVLQECDSAAQTISVDSGSGSDWNPLVIPMKGFLNCPTARIHIPTELNGDIDRYAAEIHQKEFSGATATQKLISSNPKAEEIESLLNPRTVLDAFLSLEPYDYQQRAGIRLVARKLVIH

SEQ ID NO: 808 - DNA, 1506 bp, Glycine max
atgggtgaagagcgatccgagatagtgttcttcgatgtggagaccagcgttccgacccgggcggggcagggttttgcgcttctggaattcggcgccattttggtttgccccaggacgctcacggagctccgcgattactccactctcgtccgcccagccaacctctccgtcatcacccccttgtccgagcgctgcaacggcatcaacgccgccgctgtctccgccgcccctaccttcgccgacattgctcacctcgtttacgacctcctccacgggaggatttgggcggggcataacatcataagattcgactgtgttcggattagagatgcgtttgctgagattaatcagccaccgcctgaacctaaggggaccattgactcgctggttttgttgactcaaaagtttggtagaagagctggtgacatgaagatggctactcttgctacttattttgggcttggacgccagacacataggagcttggatgatgttcggatgaatcttgaagtcctcaaatactgtgcaacagttctattcttggagtcaagtctcccagatatattcactgcaaatagttgggtttcaccaaatgctactacaagaagccgcagtaatgggaaatctccatcacagtggggcttattaaatattaataaagattctgtattatcatctcctgcaactgaatccaaagacaaaaatcgtccaataatttcttttgcattgagcagcccaaaagggaatgtctcgaatattgcagatcctaacatggatcaatcagatccttttaacttgagcactcttgaggctgaaataaaaagagaatccattaagtcagatgtcgccttggaggaaaaacccatgcaagagtcaactgatttggcttcctcatcttctgtatctcagccttgcagcagctctattgctgttttggaacctgatggaatatgtataccttctattgatgcatctcttgttccatcttttcgtggcagtcaaagaatagagttactgcatgaaggtttcctgtttcagcttcattgtactgatttgaaagtgcggtttggaataaactcaaagttttttgatagtgctggccggccacgattgagttttgtggttgatccatcaccaagtctatgtaatgttcttgatgcatgtgaccgtgtagcacagaagttaaccgtggattctggtagcagctctgattggaggcctgttgttattaggaaagaaggcttcttcaactatcctactgtcagattacacatacctactgcagtagtggcagacattgctatttatgccacggaaatatatcaaagagaatcatctggaacagtgcaaagacttctcttcagtaagtttgatgctgcagaacttggttccttgttcatgcctgggacatttgttgatgccgtcttctccttagatccgtatgattatcagcagaatgcagggattaaattagttgccaaaaaattgatcattcatagcaaatag

SEQ ID NO: 809 - protein, 501 aa, Glycine max
MGEERSEIVFFDVETSVPTRAGQGFALLEFGAILVCPRTLTELRDYSTLVRPANLSVITPLSERCNGINAAAVSAAPTFADIAHLVYDLLHGRIWAGHNIIRFDCVRIRDAFAEINQPPPEPKGTIDSLVLLTQKFGRRAGDMKMATLATYFGLGRQTHRSLDDVRMNLEVLKYCATVLFLESSLPDIFTANSWVSPNATTRSRSNGKSPSQWGLLNINKDSVLSSPATESKDKNRPIISFALSSPKGNVSNIADPNMDQSDPFNLSTLEAEIKRESIKSDVALEEKPMQESTDLASSSSVSQPCSSSIAVLEPDGICIPSIDASLVPSFRGSQRIELLHEGFLFQLHCTDLKVRFGINSKFFDSAGRPRLSFVVDPSPSLCNVLDACDRVAQKLTVDSGSSSDWRPVVIRKEGFFNYPTVRLHIPTAVVADIAIYATEIYQRESSGTVQRLLFSKFDAAELGSLFMPGTFVDAVFSLDPYDYQQNAGIKLVAKKLIIHSK

SEQ ID NO: 810 - DNA, 1506 bp, Glycine max
atgggtgaagaccgatccgaaatagtgttcttcgatgtggagaccagcgttcccacccgaacggggcagggttttgcgcttctggaattcggcgccattttggtttgccccaaaacgctcacggagcttcggaattactctactctcgttcgtcccgccaacctctccgtcatctcccccttgtcggagcgctgcaatggcatcaccgccgccgccgtctccgccgccccttccttcgccgacattgctcacctcgtttacgacctccttcacgggaggatttgggcggggcataatatcatacgattcgactgtgttcggattagagatgcctttgctgagattaatcagccgccgcctgaacctaagggaaccattgactcgctggttttgttgactcaaaagtttggaagaagagctggtgacatgaagatggctactcttgctacttattttgggcttggacgtcagacacataggagcttggatgatgttcggatgaatctggaagtcctcaaatactgtgcaacagttctattcttggagtcaagtctcccagatatattcactgcaaatagttgggtttcaccaaattctattacaagaagccgcagtaatgagaagtctctatcgcaggggggcttattaaatattaataaagattctgtattatcatctcctgcaaccgaatccaaggacaaaaatcatccaataatttcttttgcattgagcagcctaaaagggaatgtcccaaatattgcagatcctaatatagatcaatcggatccttttaacttgagcgctcttgaggctgaaataaaaagagaatccattaagtcagatgctgccatggaggaaaaaaccatgcaagagtcacctgatttggcttcctcatcttctgtatctcagccttgcagcagctctattgctgttttagaacctgatggaatatgtatcccttttattgatgcatctcttgttccatctttccttggcagtcaaaggatagaattactgcatgaaggtttcccgtttctgcttcattgtactgatttgaaagtgcggtttggaataaactcaaggttttttgatagggctggccggccacgattgagttttgtggttgatccatcaccaagtctatgtaatgttcttgatgcctgtgaccgtgtagcacagaagttaaacatggattctggtagcagctctgattggaggcctgttgttattaggaaagaaggcttcttcaactatcctactatcagattgcacatacctacagctgttgtggcagatgttgatatttatgctacggaaatataccaaagagaatcatctggaacagtgcaaagacttctcttcagcaagtttgatgctgcagaacttggttcgttgttcatgcctgggacatttgttgatgccttcttatccttagatccatatgattatcagcagaatgcagggattaaattagttagcaaaaaattgatcattcatggcaaatag

SEQ ID NO: 811 - protein, 501 aa, Glycine max
MGEDRSEIVFFDVETSVPTRTGQGFALLEFGAILVCPKTLTELRNYSTLVRPANLSVISPLSERCNGITAAAVSAAPSFADIAHLVYDLLHGRIWAGHNIIRFDCVRIRDAFAEINQPPPEPKGTIDSLVLLTQKFGRRAGDMKMATLATYFGLGRQTHRSLDDVRMNLEVLKYCATVLFLESSLPDIFTANSWVSPNSITRSRSNEKSLSQGGLLNINKDSVLSSPATESKDKNHPIISFALSSLKGNVPNIADPNIDQSDPFNLSALEAEIKRESIKSDAAMEEKTMQESPDLASSSSVSQPCSSSIAVLEPDGICIPFIDASLVPSFLGSQRIELLHEGFPFLLHCTDLKVRFGINSRFFDRAGRPRLSFVVDPSPSLCNVLDACDRVAQKLNMDSGSSSDWRPVVIRKEGFFNYPTIRLHIPTAVVADVDIYATEIYQRESSGTVQRLLFSKFDAAELGSLFMPGTFVDAFLSLDPYDYQQNAGIKLVSKKLIIHGK

SEQ ID NO: 812 - DNA, 780 bp, Oryza sativa
atgaataatatgaggacgacgatgcggcggccggagatggtgttcttcgacgtggagacgacggcggcgtcggcggatgaggggcagcgtagtgtgctggagttcggggccatcgtggtgtgcccccggaggctggtggaggtggacagctaccacacggtgatccggccgggcgacatgtcggcggtgtccaagaggttcgccgctatggtggatgtggacgtggcgtcggcgccgagcttcgatcaggtggcggagcgcatcttcggcgtgctggacgggcgggtgtgggcggggcacaacatccagcgcttcgactgccaccgcatccgcgaggcgttcgcggccatcgggcgggcagcgccggagcccgtggccatcgtcgactccctcaacgtgctggcccacgactttgggcgccgcgccggcgacctcaagatggccaccctcgcctcctacttcggcatcggcaagcagagccacaggagccttgacgacgcccgcatgaacctggaggtgctcaagcgctgcgccaccctcctgctgctcgagtccacccttcccccgggcatgctgcactcctccgccgccggatccatcaccaggaagaggagcaaccaccaagaggagccatcgtcgtcgtctcttgtcaatgtgacgcctagtaaaaggaagcagcggcagggcagcggcggcaaaatcaggcccaaggcagcaaccaccacgcccaagccatgcttccacatgatcctcaggcactccaggaccatcctcagatag

SEQ ID NO: 813 - protein, 259 aa, Oryza sativa
MNNMRTTMRRPEMVFFDVETTAASADEGQRSVLEFGAIVVCPRRLVEVDSYHTVIRPGDMSAVSKRFAAMVDVDVASAPSFDQVAERIFGVLDGRVWAGHNIQRFDCHRIREAFAAIGRAAPEPVAIVDSLNVLAHDFGRRAGDLKMATLASYFGIGKQSHRSLDDARMNLEVLKRCATLLLLESTLPPGMLHSSAAGSITRKRSNHQEEPSSSSLVNVTPSKRKQRQGSGGKIRPKAATTTPKPCFHMILRHSRTILR

SEQ ID NO: 814 - DNA, 1284 bp, Oryza sativa
atgttggcgaagacgatggcatatatgtccatggaggagggtgaggggagtagtagggcgatggtcgaggaggagccagagatcgccttctttgacgtggagacctccatgccatggggtcctagggagaggcgcacgctactcgagttcgggtccatcttcctctgcccgcggctggttgaggtcgcggagcccttcgtcacgctcgtgcgcccctccgaccttggggtggtcacggaggcgctcgaacgtaagggcatcacgcgtggcgccctcgaagacgccccgcccttctgtgacgtcgctgataacatccacaacgtcctgcacgggcgaatctgggctggtcacaacatcatttcgtttgactcagagataataagggaagcattcgctgaaattggacggtcgcctccggaaccaaaggggatgatcgacaccttacctctgcttacccagacgtttgggaggagagcagggaacatgaagatggcaaatttggcagattactttaatctagggccgcaaattcacaggagtctgtatgatgtcaggatgaatcttgatgttctcaagtgttgttctacagtgctgttcctggaggataattttccaaaactgctaagcggtgggttgaggcattttccagaactgctaagcggcggtttcctcaacccaaatgatatttcacttgagttcatccaagtttctatttctttttcctcttgtttgggcaaaagaagtctaaattccggcctccgcaccaatcctcttccatacgaatttgaacggagcttatgtatcaagcacaacgatgatccgctacaacttcattgcataggtttgagggtccattatgaagtttctctgaatcaaaacagtgaaggtcgaccaaagttgagcatagtggttgacatccctgagaatctcagacaagttctagaattttgtgatgaaatagctaagacaacattccgggagtttgggagcacttctgaatggcggcaagtgattaaggaatacgggaatcgtccttgtgtacgcctaaacatccccattataggcagcggcgacgatgcgacctatgcgatagagatatacctgaaagaggctagcggcaacatccggaagaaagatttcagcaaggcagatgtcgcagagctggaatttatgttttttcgaggggacatggtcgacgcgttcttctctgtggaactgtacaactacaaaaataatgctggtattcggctggtcgccaagaagctggttgtacactgcaggtag

SEQ ID NO: 815 - protein, 427 aa, Oryza sativa
MLAKTMAYMSMEEGEGSSRAMVEEEPEIAFFDVETSMPWGPRERRTLLEFGSIFLCPRLVEVAEPFVTLVRPSDLGVVTEALERKGITRGALEDAPPFCDVADNIHNVLHGRIWAGHNIISFDSEIIREAFAEIGRSPPEPKGMIDTLPLLTQTFGRRAGNMKMANLADYFNLGPQIHRSLYDVRMNLDVLKCCSTVLFLEDNFPKLLSGGLRHFPELLSGGFLNPNDISLEFIQVSISFSSCLGKRSLNSGLRTNPLPYEFERSLCIKHNDDPLQLHCIGLRVHYEVSLNQNSEGRPKLSIVVDIPENLRQVLEFCDEIAKTTFREFGSTSEWRQVIKEYGNRPCVRLNIPIIGSGDDATYAIEIYLKEASGNIRKKDFSKADVAELEFMFFRGDMVDAFFSVELYNYKNNAGIRLVAKKLVVHCR

SEQ ID NO: 816 - DNA, 1482 bp, Oryza sativa
atggagatggcgacgagcgcgggggaggggacgagcggtggtggtggaggaggaggaggagctgtgccggaggcggggggccccgagatcgcgttcttcgacgtggagacctccgtgccgcagcgggcggggcaggggtacgcgctgctggagttcggggccatcctcgtgtgcccgcggcggctcgtcgtggtggggtcctacgccacgctcgtccgccccggcgacctcggggtcgtctccgcggcgtccgtgcgctgcaacggcatcacccgcgacgccgtcgccgccgccccggccttccgcgacgtcgccgacgccgtctacagcgtccttcacgggcgtgtctgggctggtcacaacatcgtaaggtttgacttggccagaataagggaagcattcgctgaaattggacggccacctccggaaccaaaggggatgatcgacaccttgcctctgcttacccagaaatttgggaggagagcaggggacatgaagatggcaagcttggcaaattactttggtctggggcgacaaagtcacaggagccttgatgatgttaggatgaatcttgaagttctcaagtattgtgctacagttctcttcttggaggcaagtcttccaggagtgctgactgttgagaacctggtggagcgtgcaattacaaggagccaagctaatggagctgcttctcctgaggtgccaaaacctgtagcacggtcttcacctgattcctcaaaacggcaacgaacaatttctcgagttgacaatgcaatccaagctggaggtaaccaacaatcaatcgatcctgcaacaaacaaggaacccattgagttgatatccaatatcgaggaaatgacattaggttctggcatacagatcgatgcaagttctagtgggttttctgggttcctcgagccagatgacgtttcaactgagtccatccaaatttctgttccttcttcctaccgattaactcgaaaaacatctatcaagcacaaaggtagcccgatccaactttgttgtgctggtctgcggatccagtttggagtcagcacaaagttcctagacagcgcaggtcgcccaaagttgaacatactggttgacatccctgagaatctcagtaaaattctagaattctgtgatggtatcgctcagaaatcatctcaggattctgggagcacttctgaatggagaccattgattaaaaaatatggttatgtgaattgtcctactgtccgcctacacatccccactattgtcagcggtgaagctgcgacctatgggaccgaaatataccagaaagaggctagcggcaacattcagaagctagttttcagcaaggtagatgtcgcggagctggactcttggtttgttcgagggaacatggtggacgcattcttctctctggaactatatgactacgaagaaaatgctggtatccggctggttgctaagaagctggttgtacaatccaaatag

SEQ ID NO: 817 - protein, 493 aa, Oryza sativa
MEMATSAGEGTSGGGGGGGGAVPEAGGPEIAFFDVETSVPQRAGQGYALLEFGAILVCPRRLVVVGSYATLVRPGDLGVVSAASVRCNGITRDAVAAAPAFRDVADAVYSVLHGRVWAGHNIVRFDLARIREAFAEIGRPPPEPKGMIDTLPLLTQKFGRRAGDMKMASLANYFGLGRQSHRSLDDVRMNLEVLKYCATVLFLEASLPGVLTVENLVERAITRSQANGAASPEVPKPVARSSPDSSKRQRTISRVDNAIQAGGNQQSIDPATNKEPIELISNIEEMTLGSGIQIDASSSGFSGFLEPDDVSTESIQISVPSSYRLTRKTSIKHKGSPIQLCCAGLRIQFGVSTKFLDSAGRPKLNILVDIPENLSKILEFCDGIAQKSSQDSGSTSEWRPLIKKYGYVNCPTVRLHIPTIVSGEAATYGTEIYQKEASGNIQKLVFSKVDVAELDSWFVRGNMVDAFFSLELYDYEENAGIRLVAKKLVVQSK

SEQ ID NO: 818 - DNA, 1545 bp, Oryza sativa
atggacggcggacggcggccaagttcaccggagctcgtcgtgacgattcgagagagagggagtacaccggaacgatgggacggacaagaggaagtgagccaccgggtcggattcgccggagggaggccagcgacgacgaatcgtggcggcgcacgccggcggcgcgaaaaggggggaaacttcaccggagcaacgggggttcgattcaaaaggatgggagcatctccggggttcaaggagttcatttccggcgttggatggggtagagcgacgccgtggaggtccggcgacgagaggcggcctccgggagcgggcgccgacggcggcaaggccatggcgagcggcagcggggcttggggcggcgcctacgaaccacgcgagttaaaggaggaggagggcgagcgaggaagaggaacggagggctaccgcgtcgggacagggcaccgtgacgagcggcggcggcgcgggaggcaagctctccagcctcgggccggggaaggggaaggagaagagtggccggagtccgcgtcagctcctcgtgcgcacgccggcttcaccagcacgcgcgacggcggagggaggcgaggacggcggcagcatggtggggatggtggtccggcggcaatggcgctgtgggaggaaacgagaggaaacgagtgggaggtcgagacgctgagggggggggctcggattcgatctcgggggtttagggaggaatcaagggagactcaaggaaaggattcgagatgggaatttgatatttttcggaaatggggacagatggcaaatttggcagattactttaatctagggccgcaaattcacaggagtctgtatgatgtcaggatgaatcttgatgttctcaagtgttgttctacagtgctgttcctggaggataattttccagaactgctaagcggcggtttcctcaacccaaatgatatttcactcgagttcatccaagtttctatttctttttcctcttgtttgggcaaaagaagtctaacttccggccttcgcaccaattctcttccataccaatttgaatggagcttatgtatcgagcacaacgataatccgctacaacttcgttgcataggtttgagggtccgttatgaagtttatctgtatcaagacagtgaaggtcgaccaaataagttgagcatagtggttgacatccctgagaatctcagacaagttctagaattttgtgatgaaatagctgagataacattccggaagtttgggagcaattctgaatggcggcaagtgattaaggaatacgggaatcgtcctagtgtacgcctaaacatccccatcgtaggcagcggcgacgatgcgacctatgcgacagagatatacctgaaagaggctagcggcaacatccggaagaaggatttcagcaaggcagatgtcgcagagctggaatttatgttttttcgaggggacatggtcgacgcgttcttctctgtggaactatacgactacaaaaataatgctggtattcggctggtcgccaagaagttggttgtacactgcaggtag

SEQ ID NO: 819 - protein, 514 aa, Oryza sativa
MDGGRRPSSPELVVTIRERGSTPERWDGQEEVSHRVGFAGGRPATTNRGGARRRREKGGNFTGATGVRFKRMGASPGFKEFISGVGWGRATPWRSGDERRPPGAGADGGKAMASGSGAWGGAYEPRELKEEEGERGRGTEGYRVGTGHRDERRRRGRQALQPRAGEGEGEEWPESASAPRAHAGFTSTRDGGGRRGRRQHGGDGGPAAMALWEETRGNEWEVETLRGGARIRSRGFREESRETQGKDSRWEFDIFRKWGQMANLADYFNLGPQIHRSLYDVRMNLDVLKCCSTVLFLEDNFPELLSGGFLNPNDISLEFIQVSISFSSCLGKRSLTSGLRTNSLPYQFEWSLCIEHNDNPLQLRCIGLRVRYEVYLYQDSEGRPNKLSIVVDIPENLRQVLEFCDEIAEITFRKFGSNSEWRQVIKEYGNRPSVRLNIPIVGSGDDATYATEIYLKEASGNIRKKDFSKADVAELEFMFFRGDMVDAFFSVELYDYKNNAGIRLVAKKLVVHCR

SEQ ID NO: 820 - DNA, 1509 bp, Populus trichocarpa
atggaaaacaaaacagagatagctttcttcgatgttgaaaccacggtcccgacccgacccggccaggggtatgctatacttgaattcggggccatccttgtctgcccccagaagctagaagagatcaggagctactcgaccttggtccgaccctccaacccgaagctcatatcttccttgtccgtacggtgtaacggcatcataccagaagctgtggtttcagcaccgtccttcgctgacattgctgacacggtctacgacatcctccatgggaggatatgggcgggccataatatagtcagatttgattgtgtgcgaataagagaggcgtttgcggagattggaagggcagcaccagagccaaaggggactattgactcgttagcattattgactcagaagtttggaaggagagctggcaacatgaagatggcaagccttgcaacttattttgggcttggaaaccaaacacataggagtttagatgatgtaagaatgaatgttgaggttcttaagcattgtgctactgtcctattcctgcctcaatcaacagacgcatttccagaaaaccattgggtttcccctaatgctatcacaagaagtcgtagaaatggaaaatccccagtcctaaacaagaattccccgtcttcgagttcacacgttaaaagcacccctgccctgtctcctgaaaatgatagaactgaggaaaagcgtccagtcttttctcttctcacaagcaatactgctgaggcccaatattctgttgcatctaatacagctcatcctgatacatttgacatggtcgcacttggcaatgaaatgaatgctgcctcctttcaaccagatgtcgccatggaggaaaacccaatactacagcctcctgagatgccttctacagtgactgtccctgaaagttgcagtgacgttttgggtttcttagagcttgatgaagtttctctttcttctattagagcatttcatgtcccgttctttcgagggagtcatagaatcaaattattttacgagggggccattttgcagcttcgctgtcctcggttgaggatacggtttggactaagtacgaagttttctgatcatgcaggccggccacggttgagttttgtggttgatgcatctccaagtctatgtgatgttcttgatacatgtgagagcattgtgcggaaagtttgtgcagattcggattgtagttctgattggaggagtgttgttaccagaaaacagggctttgtcaacaaccctaccgtgagattgaacatacctactgcagtaaatggggatgttgctcaatatgcaacggatatgtatctgaaagaaccatctggaaccacacaaaagctcatattcagtaagtttgatgctgccgagctggatacctggttcagaccagggacctttgtcgatgcatacttgtccttggatccatacgactatcagcagacttctggcatccgattagtggcaaataaattaatcatccataatgagtga

SEQ ID NO: 821 - protein, 502 aa, Populus trichocarpa
MENKTEIAFFDVETTVPTRPGQGYAILEFGAILVCPQKLEEIRSYSTLVRPSNPKLISSLSVRCNGIIPEAVVSAPSFADIADTVYDILHGRIWAGHNIVRFDCVRIREAFAEIGRAAPEPKGTIDSLALLTQKFGRRAGNMKMASLATYFGLGNQTHRSLDDVRMNVEVLKHCATVLFLPQSTDAFPENHWVSPNAITRSRRNGKSPVLNKNSPSSSSHVKSTPALSPENDRTEEKRPVFSLLTSNTAEAQYSVASNTAHPDTFDMVALGNEMNAASFQPDVAMEENPILQPPEMPSTVTVPESCSDVLGFLELDEVSLSSIRAFHVPFFRGSHRIKLFYEGAILQLRCPRLRIRFGLSTKFSDHAGRPRLSFVVDASPSLCDVLDTCESIVRKVCADSDCSSDWRSVVTRKQGFVNNPTVRLNIPTAVNGDVAQYATDMYLKEPSGTTQKLIFSKFDAAELDTWFRPGTFVDAYLSLDPYDYQQTSGIRLVANKLIIHNE

SEQ ID NO: 822 - DNA, 618 bp, Populus trichocarpa
atggaggcctccagtcctgtaagcacaccagagattgtgttcttcgacttagaaacaacggtgcccaataaagctggacaacggttctgggtactggagtttggtgcaataatagtttgtccacggaaacttgttgagctagatagttatagcacactcataagacctgaggacttgtctgctgttgcattgaagtctggtcgatgtgatgggataactcgtgaagctgttgcaaatgcacctgcattcgaggaagttgctgacaaaatatttaccattttgaacggtagaatatgggctggacataacatccaaagatttgactgtgtccgaattaaggaggcatttgcagagattggtcggcctgcaccaatgcctgttggaatgtttgattctttaggagttctgacggaaaaatttggcagaagagctggtaacatgaagatggcaactttggctacttattttgggctcggccagcaaaaacacagatgtgcgtatgaacctggaggtcttgaagcattgcgcagcagttttattcgtggaatcaagccttccaagtgtaatgaatggcaaatggcacaacccttcgacaatggtaactcgaagcagaagtaa

SEQ ID NO: 823 - protein, 205 aa, Populus trichocarpa
MEASSPVSTPEIVFFDLETTVPNKAGQRFWVLEFGAIIVCPRKLVELDSYSTLIRPEDLSAVALKSGRCDGITREAVANAPAFEEVADKIFTILNGRIWAGHNIQRFDCVRIKEAFAEIGRPAPMPVGMFDSLGVLTEKFGRRAGNMKMATLATYFGLGQQKHRCAYEPGGLEALRSSFIRGIKPSKCNEWQMAQPFDNGNSKQK

SEQ ID NO: 824 - DNA, 679 bp, Populus trichocarpa
atggagtcgtctagtccttatcccgtaggctcaccagagattgtggtcttcgacttggaaacaacggtgcccaatagagccggacaacggttccgggtactggagtttggtgcaataacagtttgtccacggaaacttgttgagctagatagctatagtaccctcataagacctaaggacttgtctgctgttgcattgaagtctggtcgatgtgatggaataactcgtggagctgtttcaaatgcacctgcattcgaggaagttgctgataaaatttttagtattttgaatggtagaatttgggcaggacataacatccaaagatttgactgtgtccggattaaggaggcatttgcagagattggtaagccggcgccagttcctgctggaatgattgattctttaggagtcctgactgaaagattcggcagaagagccggtaacatgaagatggcaactttagctgcttattttgggctcggcaagcaaaaacacaggagtctcgatgacgttcgtatgaacttagaggtcttgaagcattgcgctacggttttattcctggaatcatgccttccaagcgtttcgaatgccaaatggtgcaacccttcaacaatagtaactcgaagcagaagtaatggaaaactgccgtgtagggaagaaaatagccgaaaatcacctc

SEQ ID NO: 825 - protein, 231 aa, Populus trichocarpa
MESSSPYPVGSPEIVVFDLETTVPNRAGQRFRVLEFGAITVCPRKLVELDSYSTLIRPKDLSAVALKSGRCDGITRGAVSNAPAFEEVADKIFSILNGRIWAGHNIQRFDCVRIKEAFAEIGKPAPVPAGMIDSLGVLTERFGRRAGNMKMATLAAYFGLGKQKHRSLDDVRMNLEVLKHCATVLFLESCLPSVSNAKWCNPSTIVTRSRSNGKLPCREENSRKSPPTTLG

SEQ ID NO: 826 - DNA, 2280 bp, Saccharomyces cerevisiae
atgggtgtctcacaaatatgggaatttttgaagccatatctgcaagattccagaattccgttgagaaagtttgtcatagactttaataaatcgcaaaaaagagctccaagaatcgcgattgacgcatatggatggctatttgagtgtggatttatccaaaatatagatataagccccagatctagatcaagatcaaggagtcctacccgttctccgcgtgatagtgatatcgacagtagtcaagaatattatggtagcagaagttatacaactacaggaaaagctgtgataaacttcatatctcgattaaaagaactactgagtttaaacgtcgaattcttgcttgtatttgacggagttatgaaaccctctttcaaaaggaaatttaaccacgaacagaacgctactacttgtgatgatgagaaagagtactattcaagctgggaacagcatgttaagaatcatgaagtttatggcaattgtaaaggattgctagcgccatctgaccctgagttcatcagtcttgtacggaaattattagacttgatgaacatttcatatgtaatcgcatgtggggagggagaagcccagtgtgtttggctgcaagtttctggggctgtagatttcattttaagtaacgattcagatactctcgtatttgggggagaaaaaatcctgaaaaattactcgaaattctacgatgattttggcccaagttcaataacttcccacagtcccagtagacatcatgatagtaaagaatcttttgttactgttatagatctacccaaaattaataaagtagcagggaagaagtttgatcgcctgtctctcttatttttcagcgtgctattaggtgccgattacaatcgtggagtcaagggtttgggtaaaaacaaatctttgcagttggctcaatgcgaagatcctaacttttccatggaattttatgacattttcaaagatttcaatttagaagatttgacatcagaaagtctgaggaagtctcggtatagattgtttcaaaaaagattatatttatactgcaaggatcattctgtcgagctatttggaagaaattatcctgttttattgaatcaaggttcatttgaaggctggccatcaactgtcgcaatcatgcactattttcaccccattgtccaaccatattttgatgaagaagttctcagtgataaatacataaatatggctggaaacggacactacagaaacttaaatttcaatgaactgaaatattttttacaaagtttgaatttgcctcaaatttctagcttcgacaagtggtttcatgattctatgcacgagatgtttctattaagagaatttttatcaattgatgagtccgataatataggtaaaggtaatatgaggattaccgaagaaaaaattatgaacatagatggtggaaagttccaaataccatgttttaaaatacggtatacaacattcttgcctaatatacccatttcttctcaatctcctttgaagcgcagtaattctcccagtagaagcaagagtcccacacgacgtcagatggatataatggaacacccaaatagtctttggttacccaaatacttgatacctcaatcgcatccattagtaattcaatattatgagacacagcaacttatacagaaagaaaaagagaagaaaggtaaaaaatcgaataagtctcggctaccacagaagaataacttggatgagtttttaagaaagcatacttcgccgattaaaagtatcggaaaggtaggcgagtcgagaaaggaaatcctggaacctgtgagaaaaaggctttttgtagatacagacgaagatactagtctggaagaaataccggctcccacaagactgaccaccgtcgatgaacacagcgataatgacgatgattcgttgatttttgtagatgagattacaaacagccaaagcgttttagatagttcacccggtaaaagaattcgggatcttacacaggacgaacaggttgacgtttggaaggacgtaatagaaatatcaccaataaaaaagtcaagaactactaatgctgagaaaaatccgcctgagtctggtttaaaatcacgctcaagcatcacaatcaatgctcgccttcaaggtactaagatgttgcctccaaacttgactgctccaaggttagaaagagaacactcctctgtccttgaccaacttgtcacagacgcacaagatacagtcgaccggtttgtagcctgtgacagtgatagcagtagcactattgaatga

SEQ ID NO: 827 - protein, 759 aa, Saccharomyces cerevisiae
MGVSQIWEFLKPYLQDSRIPLRKFVIDFNKSQKRAPRIAIDAYGWLFECGFIQNIDISPRSRSRSRSPTRSPRDSDIDSSQEYYGSRSYTTTGKAVINFISRLKELLSLNVEFLLVFDGVMKPSFKRKFNHEQNATTCDDEKEYYSSWEQHVKNHEVYGNCKGLLAPSDPEFISLVRKLLDLMNISYVIACGEGEAQCVWLQVSGAVDFILSNDSDTLVFGGEKILKNYSKFYDDFGPSSITSHSPSRHHDSKESFVTVIDLPKINKVAGKKFDRLSLLFFSVLLGADYNRGVKGLGKNKSLQLAQCEDPNFSMEFYDIFKDFNLEDLTSESLRKSRYRLFQKRLYLYCKDHSVELFGRNYPVLLNQGSFEGWPSTVAIMHYFHPIVQPYFDEEVLSDKYINMAGNGHYRNLNFNELKYFLQSLNLPQISSFDKWFHDSMHEMFLLREFLSIDESDNIGKGNMRITEEKIMNIDGGKFQIPCFKIRYTTFLPNIPISSQSPLKRSNSPSRSKSPTRRQMDIMEHPNSLWLPKYLIPQSHPLVIQYYETQQLIQKEKEKKGKKSNKSRLPQKNNLDEFLRKHTSPIKSIGKVGESRKEILEPVRKRLFVDTDEDTSLEEIPAPTRLTTVDEHSDNDDDSLIFVDEITNSQSVLDSSPGKRIRDLTQDEQVDVWKDVIEISPIKKSRTTNAEKNPPESGLKSRSSITINARLQGTKMLPPNLTAPRLEREHSSVLDQLVTDAQDTVDRFVACDSDSSSTIE

SEQ ID NO: 828 - protein, 29 aa, Artificial sequence
  motif 40
  VARIANT (2)..(2): / replace = "Lys" / replace = "Cys"
  VARIANT (3)..(3): / replace = "Thr"
  VARIANT (6)..(6): / replace = "Ile"
  VARIANT (8)..(8): / replace = "Ala"
  VARIANT (14)..(14): / replace = "Arg"
  VARIANT (15)..(15): / replace = "Ala"
  VARIANT (17)..(17): / replace = "Leu"
  VARIANT (20)..(20): / replace = "Ala"
  VARIANT (25)..(25): / replace = "Glu" / replace = "Leu"
GQRVAVDTYSWLHKGAYSCSRELCKGLPT

SEQ ID NO: 829 - protein, 50 aa, Artificial sequence
  motif 41
  VARIANT (2)..(2): / replace = "Phe"
  VARIANT (4)..(4): / replace = "Lys"
  VARIANT (8)..(8): / replace = "Met"
  VARIANT (10)..(10): / replace = "Leu"
  VARIANT (12)..(12): / replace = "His"
  VARIANT (13)..(13): / replace = "Lys"
  VARIANT (14)..(14): / replace = "Ile"
  VARIANT (17)..(17): / replace = "Val"
  VARIANT (18)..(18): / replace = "Val"
  VARIANT (29)..(29): / replace = "Ser"
  VARIANT (30)..(30): / replace = "Glu"
  VARIANT (31)..(31): / replace = "Thr" / replace = "Glu"
  VARIANT (36)..(36): / replace = "Arg"
  VARIANT (38)..(38): / replace = "Lys"
  VARIANT (44)..(44): / replace = "Ala"
  VARIANT (47)..(47): / replace = "Arg"
  VARIANT (49)..(49): / replace = "Leu"
  VARIANT (50)..(50): / replace = "Leu" / replace = "Trp"
YCMHRVNLLRHYGVKPILVFDGGRLPMKADQENKRARSRKENLERAKEHE

SEQ ID NO: 830 - protein, 29 aa, Artificial sequence
  motif 42
  VARIANT (2)..(2): / replace = "Gln" / replace = "Ala"
  VARIANT (4)..(4): / replace = "Ile"
  VARIANT (12)..(12): / replace = "Leu"
  VARIANT (13)..(13): / replace = "Pro"
  VARIANT (14)..(14): / replace = "Tyr"
  VARIANT (17)..(17): / replace = "Lys"
  VARIANT (19)..(19): / replace = "Val"
  VARIANT (20)..(20): / replace = "Phe"
  VARIANT (23)..(23): / replace = "Leu"
  VARIANT (25)..(25): / replace = "Arg"
  VARIANT (26)..(26): / replace = "Tyr" / replace = "Asn"
VDAVITEDSDLIAFGCPRIIFKMDKFGQG

SEQ ID NO: 831 - DNA, 2194 bp, Oryza sativa; identical to SEQ ID NO: 289

SEQ ID NO: 832 - DNA, 1244 bp, Oryza sativa
aaaaccaccgagggacctgatctgcaccggttttgatagttgagggacccgttgtgtctggttttccgatcgagggacgaaaatcggattcggtgtaaagttaagggacctcagatgaacttattccggagcatgattgggaagggaggacataaggcccatgtcgcatgtgtttggacggtccagatctccagatcactcagcaggatcggccgcgttcgcgtagcacccgcggtttgattcggcttcccgcaaggcggcggccggtggccgtgccgccgtagcttccgccggaagcgagcacgccgccgccgccgacccggctctgcgtttgcaccgccttgcacgcgatacatcgggatagatagctactactctctccgtttcacaatgtaaatcattctactattttccacattcatattgatgttaatgaatatagacatatatatctatttagattcattaacatcaatatgaatgtaggaaatgctagaatgacttacattgtgaattgtgaaatggacgaagtacctacgatggatggatgcaggatcatgaaagaattaatgcaagatcgtatctgccgcatgcaaaatcttactaattgcgctgcatatatgcatgacagcctgcatgcgggcgtgtaagcgtgttcatccattaggaagtaaccttgtcattacttataccagtactacatactatatagtattgatttcatgagcaaatctacaaaactggaaagcaataagaaatacgggactggaaaagactcaacattaatcaccaaatatttcgccttctccagcagaatatatatctctccatcttgatcactgtacacactgacagtgtacgcataaacgcagcagccagcttaactgtcgtctcaccgtcgcacactggccttccatctcaggctagctttctcagccacccatcgtacatgtcaactcggcgcgcgcacaggcacaaattacgtacaaaacgcatgaccaaatcaaaaccaccggagaagaatcgctcccgcgcgcggcggcgacgcgcacgtacgaacgcacgcacgcacgcccaaccccacgacacgatcgcgcgcgacgccggcgacaccggccgtccacccgcgccctcacctcgccgactataaatacgtaggcatctgcttgatcttgtcatccatctcaccaccaaaaaaaaaaggaaaaaaaaacaaaacacaccaagccaaataaaagcgacaa

SEQ ID NO: 833 - DNA, 56 bp, Artificial sequence
  prm12748
ggggacaagtttgtacaaaaaagcaggcttaaacaatgggaatacaagggctttta

SEQ ID NO: 834 - DNA, 50 bp, Artificial sequence
  prm12749
ggggaccactttgtacaagaaagctgggtgttttccaaaagtcagcgtct

SEQ ID NO: 835 - DNA, 1071 bp, Medicago truncatula
atggcgaaaaaatcgcagaagcaaatagagaaagacgacaatgcaagcaatgataatgataatctgaatccaagtaacactgtcaccaccaaagcaaaacggacgaggaaaagtgtccctagaacttctccacctcaacgcagctcaatatacagaggagtcactaggcaccgttggacaggccgatatgaagctcatttgtgggacaagaattgttggaatgagtctcagaacaagaaagggagacaaggtgcttatgataatgaggagacggcagcacatgcttatgatctagcagcattgaaatattggggtcaagataccattattaattttccgctatcaaactatcagaaagaactaattgaaatggagagtcaatcaagggaggagtatattggatccttaagaaggaaaagcagtggtttttcacggggtgtatctaaatacagaggtgtagcaagacatcatcatgacggaaggtgggaggcacggattggcaaagtttttggcaataagtatctttatctcggaacatatgctacccaagaagaagcagctacagcttatgacatggcagctattgaataccgtggacttaatgctgttaccaatttcgacctaagccgttatattaagtggcttaagcccaacaataacaacaatgacgacaataacaagtctaatattaatctttgtgacattaactctaacagtagtgccaacgactcaaactctaatgaagaattggaatttagcctcgtggacaatgaaatatcactcaataattctattgacgaagccacattggttcaacctcgaccaactagtgccacgtcagccctagagcttttgcttcaatcatctaagtttaaggaaatggtggaaatggcatcaatgacttccaatgtgtcaacgacgttggagtctgatcaattgtcacaatgtgcatttcctgatgacattcaaacgtactttgaatatgaaaatttcaatgatacaatgttggaagacctcaactccattatgcctacgtttcattatgactttgagggtgctgaggttttatag

SEQ ID NO: 836 - protein, 356 aa, Medicago truncatula
MAKKSQKQIEKDDNASNDNDNLNPSNTVTTKAKRTRKSVPRTSPPQRSSIYRGVTRHRWTGRYEAHLWDKNCWNESQNKKGRQGAYDNEETAAHAYDLAALKYWGQDTIINFPLSNYQKELIEMESQSREEYIGSLRRKSSGFSRGVSKYRGVARHHHDGRWEARIGKVFGNKYLYLGTYATQEEAATAYDMAAIEYRGLNAVTNFDLSRYIKWLKPNNNNNDDNNKSNINLCDINSNSSANDSNSNEELEFSLVDNEISLNNSIDEATLVQPRPTSATSALELLLQSSKFKEMVEMASMTSNVSTTLESDQLSQCAFPDDIQTYFEYENFNDTMLEDLNSIMPTFHYDFEGAEVL

SEQ ID NO: 837 - DNA, 1038 bp, Arabidopsis thaliana
atgttcatcgccgtcgaagtttctccggtaatggaagacatcacacggcagagcaaaaaaacttcggttgagaatgaaaccggcgatgatcagtcagcaacatcagtagtccttaaagctaaacgcaaacgccgatcgcaaccacgagacgctccaccccaacgtagctccgtccatagaggcgtcacaaggcatcgatggactggaaggtacgaagcacatttgtgggataagaatagttggaacgaaactcagaccaagaaaggaagacaagtatatttaggggcatatgacgaggaagatgcagcagcacgtgcctacgacttagcagcattgaaatattggggacgagacaccatcttgaacttccctttgtgtaattatgaagaagacatcaaagaaatggaaagccagtcaaaggaagagtatattggatctttgagaagaaaaagtagtgggttttcacgaggtgtatcaaaatacagaggcgttgcaaagcatcaccacaatgggagatgggaagctcgaatcggaagagtgtttggcaataaatatttataccttggaacttacgcgacgcaagaagaagcagctatagcgtacgatatcgcagctatcgagtaccgtggactcaacgccgttactaacttcgacatcagccgttatctgaaactcccggtgccggagaaccctatcgataccgcgaataatctcctcgagagtccgcattctgatcttagcccatttataaaacctaaccacgagtctgacttatcacagagtcaatcttcgtcagaggacaacgatgatcggaaaacaaagctcttgaagtcgtcacctttagtggcagaggaggtaatcggaccatcgacgccacctgagattgctccgcctcgtcggagcttcccggaagatatccagacgtatttcgggtgtcaaaactccggcaagttaacggcggaggaagatgatgttatcttcggtgatttagattctttccttacgcctgatttctacagcgagttaaatgattgctaa

SEQ ID NO: 838 - protein, 345 aa, Arabidopsis thaliana
MFIAVEVSPVMEDITRQSKKTSVENETGDDQSATSVVLKAKRKRRSQPRDAPPQRSSVHRGVTRHRWTGRYEAHLWDKNSWNETQTKKGRQVYLGAYDEEDAAARAYDLAALKYWGRDTILNFPLCNYEEDIKEMESQSKEEYIGSLRRKSSGFSRGVSKYRGVAKHHHNGRWEARIGRVFGNKYLYLGTYATQEEAAIAYDIAAIEYRGLNAVTNFDISRYLKLPVPENPIDTANNLLESPHSDLSPFIKPNHESDLSQSQSSSEDNDDRKTKLLKSSPLVAEEVIGPSTPPEIAPPRRSFPEDIQTYFGCQNSGKLTAEEDDVIFGDLDSFLTPDFYSELNDC

SEQ ID NO: 839 - DNA, 1047 bp, Aquilegia sp.
atggcgaagatatcacagcagaatcagaagatcactgtaaataacattaaaactaatgatgagactataaccaaagtgaagagaaagcgaaagagcgttccaagagactctcctcctcaacgcagctcaatatttcgaggagtcacaaggcatcgatggacaggtcgatatgaagctcatctctgggataagagttgttggaatgagtcgcagaagaagaaaggaagacaagtctatcttggtgcttataacgacgaagaggctgcagcacatacatatgatttggcagcactaaagtattggggacctgaaaccatccttaacttcccggtatcaacttaccaaggggagctagaggaaatggagagtcagtcaagagaagaatatattggatcattgagaaggaagagtagtggattttctcgtggagtttcgaaatacagaggtgttgcaagacatcatcacaatggaagatgggaagctcgaattggcagagtatttggcaacaaatatctctatcttggaacttatgcaactcaagaagaagctgcaacagcatatgacatggcagcaattgagtaccgtggactcaatgcagttaccaactttgacctcagccgttacatcaaatggcttcgacccaaccctacggactctaaaactaataattctagccctgactcccaccttgctgcaaccccaactgaagatattggaattggcatcctcaaccatcagacctctatcacaagcaaaatggttgtagggcagccacgaccaacaggtggctccagtgcttcatcggctctaggacttctgtttcagtcatcaaagttcaaggaaatgcttgagagaacatcatcagtggattacccttacccatcaacaccaccggaatctgacccaccaaggtgtagttttccagaagaaatacaaacctacttcgagtgtcaggattctgagagctatgtggaaggaaatgacattattttctgcgatctaaacactttttcatccccgatgtttcagcatgagttggagacatga

SEQ ID NO: 840 - protein, 348 aa, Aquilegia sp.
MAKISQQNQKITVNNIKTNDETITKVKRKRKSVPRDSPPQRSSIFRGVTRHRWTGRYEAHLWDKSCWNESQKKKGRQVYLGAYNDEEAAAHTYDLAALKYWGPETILNFPVSTYQGELEEMESQSREEYIGSLRRKSSGFSRGVSKYRGVARHHHNGRWEARIGRVFGNKYLYLGTYATQEEAATAYDMAAIEYRGLNAVTNFDLSRYIKWLRPNPTDSKTNNSSPDSHLAATPTEDIGIGILNHQTSITSKMVVGQPRPTGGSSASSALGLLFQSSKFKEMLERTSSVDYPYPSTPPESDPPRCSFPEEIQTYFECQDSESYVEGNDIIFCDLNTFSSPMFQHELET

SEQ ID NO: 841 - DNA, 693 bp, Citrus clementina
atggcgaaaacctcaaggcaaagccaaaagaacactactacaaaccctaataacaataatacagtcacgaccaagactaagagaacaagaaaaagcgtgccccgtgactcgccgccgcaacgtagctcgatctaccgaggcgttaccaggcatcgatggacgggacgatatgaagctcatttgtgggataaaaattgctggaatgagtctcaaaacaagaaagggagacaagtatatttaggtgcttatgataatgaagaagctgcagcacgtgcctatgatttggcagcattgaaatattggggacatgatactattcttaatttcccactttcgaattatgaagaagagctcgtagaaatggagggtcagtcaaaagaggaatatattggttctttaaggagaaaaagtagtggattttctcgaggggtctccaaatatagaggcgtagcaagacaccatcacaatggcagatgggaagctcgaattggcagagtttttggcaacaaatatctctatcttggaacttatgctactcaagaagaagcagctcaagcctatgacagggcagcaatagagtatcgtgaacttaatgctgtcaccaactttgatcttagcaaatacattaagtggttacgcccaaataataatcaaaataaccctaaaactagcaaccctcaaacaaaaccctaa

SEQ ID NO: 842 - protein, 230 aa, Citrus clementina
MAKTSRQSQKNTTTNPNNNNTVTTKTKRTRKSVPRDSPPQRSSIYRGVTRHRWTGRYEAHLWDKNCWNESQNKKGRQVYLGAYDNEEAAARAYDLAALKYWGHDTILNFPLSNYEEELVEMEGQSKEEYIGSLRRKSSGFSRGVSKYRGVARHHHNGRWEARIGRVFGNKYLYLGTYATQEEAAQAYDRAAIEYRELNAVTNFDLSKYIKWLRPNNNQNNPKTSNPQTKP

SEQ ID NO: 843 - DNA, 690 bp, Citrus clementina
atggcgaaaacctcaaggcaaagccaaaagaacactactacaaaccctaataacaataatacagtcacgaccaagactaagagaacaagaaaaagcgtgccccgtgactcgccgccgcaacgtagctcgatctaccgaggcgttaccaggcatcgatggacgggacgatatgaagctcatttgtgggataaaaattgctggaatgagtctcaaaacaagaaagggagacaagtatatttaggtgcttatgataatgaagaagctgcagcacgtgcctatgatttggcagcattgaaatattggggacatgatactattcttaatttcccactttcgaattatgaagaagagctcgtagaaatggagggtcagtcaaaagaggaatatattggttctttaaggagaaaaagtagtggattttctcgaggggtctccaaatatagaggcgtagcaagacaccatcacaatggcagatgggaagctcgaattggcagagtttttggcaacaaatatctctatcttggaacttatgctactcaagaagaagcagctcaagcctatgacagggcagcaatagagtatcgtggacttaatgctgtcaccaactttgatcttagcaatacattaagtggttacgcccaaataataatcaaaataaccctaaacctagcaacctcaacaaacccctaa

SEQ ID NO: 844 - protein, 229 aa, Citrus clementina
MAKTSRQSQKNTTTNPNNNNTVTTKTKRTRKSVPRDSPPQRSSIYRGVTRHRWTGRYEAHLWDKNCWNESQNKKGRQVYLGAYDNEEAAARAYDLAALKYWGHDTILNFPLSNYEEELVEMEGQSKEEYIGSLRRKSSGFSRGVSKYRGVARHHHNGRWEARIGRVFGNKYLYLGTYATQEEAAQAYDRAAIEYRGLNAVTNFDLSNTLSGYAQIIIKITLNLATSTNP

SEQ ID NO: 845 - DNA, 1116 bp, Citrus clementina
atggcgaaaacctcaaggcaaagccaaaagaacactactacaaaccctaataacaataatacagtcacgaccaagactaagagaacaagaaaaagcgtgccccgtgactcgccgccgcaacgtagctcgatctaccgaggcgttaccaggcatcgatggacgggacgatatgaagctcatttgtgggataaaaattgctggaatgagtctcaaaacaagaaagggagacaagtatatttaggtgcttatgataatgaagaagctgcagcacgtgcctatgatttggcagcattgaaatattggggacatgatactattcttaatttcccactttcgaattatgaagaagagctcgtagaaatggagggtcagtcaaaagaggaatatattggttctttaaggagaaaaagtagtggattttctcgaggggtctccaaatatagaggcgtagcaagacaccatcacaatggcagatgggaagctcgaattggcagagtttttggcaacaaatatctctatcttggaacttatgctactcaagaagaagcagctcaagcctatgacagggcagcaatagagtatcgtggacttaatgctgtcaccaactttgatcttagcaaatacattaagtggttacgcccaaataataatcaaaataaccctaaacctagcaaccctcaacaaaaccctaatagtgatgacacaagtccaattccaaaactaaatcaggaaacctcaagcggtagtgacacgtcagcacctccaccacggtctggtgctaccgcaggaggtagcggctcggcgtcatcggcattagggcttttgctacaatcgtcaaaatataaggaaagggtggagaaaactttcaccagattgtttatctacgtcatcagaacctgggtcttcccaaccggaatttttctgaagatattccgacgagggtttttccaattgttcgggactctagcagccttacccggaagggtggaggacgttttcattggggtggacccaaaatcccattatatttttccccaactttttttaaggtggaaacttggaataaatttaaaaaaacaaaaaccctgggaacccccccacgggaaggaaaaataa

SEQ ID NO: 846 - protein, 371 aa, Citrus clementina
MAKTSRQSQKNTTTNPNNNNTVTTKTKRTRKSVPRDSPPQRSSIYRGVTRHRWTGRYEAHLWDKNCWNESQNKKGRQVYLGAYDNEEAAARAYDLAALKYWGHDTILNFPLSNYEEELVEMEGQSKEEYIGSLRRKSSGFSRGVSKYRGVARHHHNGRWEARIGRVFGNKYLYLGTYATQEEAAQAYDRAAIEYRGLNAVTNFDLSKYIKWLRPNNNQNNPKPSNPQQNPNSDDTSPIPKLNQETSSGSDTSAPPPRSGATAGGSGSASSALGLLLQSSKYKERVEKTFTRLFIYVIRTWVFPTGIFLKIFRRGFFQLFGTLAALPGRVEDVFIGVDPKSHYIFPQLFLRWKLGINLKKQKPWEPPHGKEK

SEQ ID NO: 847 - DNA, 747 bp, Citrus clementina
atggcgaaaacctcaaggcaaagccaaaagaacactactacaaaccctaataacaataatacagtcacgaccaagactaagagaacaagaaaaagcgtgccccgtgactcgccgccgcaacgtagctcgatctaccgaggcgttaccaggcatcgatggacgggacgatatgaagctcatttgtgggataaaaattgctggaatgagtctcaaaacaagaaagggagacaagtatatttaggtgcttatgataatgaagaagctgcagcacgtgcctatgatttggcagcattgaaatattggggacatgatactattcttaatttcccactttcgaattatgaagaagagctcgtagaaatggagggtcagtcaaaagaggaatatattggttctttaaggagaaaaagtagtggattttctcgaggggtctccaaatatagaggcgtagcaagacaccatcacaatggcagatgggaagctcgaattggcagagtttttggcaacaaatatctctatcttggaacttatgctactcaagaagaagcagctcaagcctatgacagggcagcaatagagtatcgtggacttaatgctgtcaccaactttgatcttagcaaatacattaagtggttacgcccaaataataatcaaaataaccctaaacctagcaaccctcaacaaaaccctaatagtgatgacacaagtccaattccaaaaactaaatcaagaaacctcaagcggtag

SEQ ID NO: 848 - protein, 248 aa, Citrus clementina
MAKTSRQSQKNTTTNPNNNNTVTTKTKRTRKSVPRDSPPQRSSIYRGVTRHRWTGRYEAHLWDKNCWNESQNKKGRQVYLGAYDNEEAAARAYDLAALKYWGHDTILNFPLSNYEEELVEMEGQSKEEYIGSLRRKSSGFSRGVSKYRGVARHHHNGRWEARIGRVFGNKYLYLGTYATQEEAAQAYDRAAIEYRGLNAVTNFDLSKYIKWLRPNNNQNNPKPSNPQQNPNSDDTSPIPKTKSRNLKR

SEQ ID NO: 849 - DNA, 981 bp, Citrus clementina
atggcgaaaacctcaaggcaaagccaaaagaacactactacaaaccctaataacaataatacagtcacgaccaagactaagagaacaagaaaaagcgtgccccgtgactcgccgccgcaacgtagctcgatctaccgaggcgttaccaggcatcgatggacgggacgatatgaagctcatttgtgggataaaaattgctggaatgagtctcaaaacaagaaagggagacaagtatatttaggtgcttatgataatgaagaagctgcagcacgtgcctatgatttggcagcattgaaatattggggacatgatactattcttaatttcccactttcgaattatgaagaagagctcgtagaaatggagggtcagtcaaaagaggaatatattggttctttaaggagaaaaagtagtggattttctcgaggggtctccaaatatagaggcgtagcaagacaccatcacaatggcagatgggaagctcgaattggcagagtttttggcaacaaatatctctatcttggaacttatgctactcaagaagaagcagctcaagcctatgacagggcagcaatagagtatcgtggacttaatgctgtcaccaactttgatcttagcaaatacattaagtggttacgcccaaataataatcaaaataaccctaaacctagcaaccctcaacaaaaccctaatagtgatgacacaagtccaattccaaaactaaatcaggaaacctcaagcggtagtgacacgtcagcacctccaccacggtctggtgctaccgcaggaggtagcggctcggcgtcatcggcattagggcttttgctacaatcgtcaaaatataaggaaatggtggagaaaacttcaacagattgtttatctacgtcatcagaacctggttcttcacaccggatttttcctgatgatattcagacgatgtttttcgattgtcaggactctagcagctacacggaggggtga

SEQ ID NO: 850 - protein, 326 aa, Citrus clementina
MAKTSRQSQKNTTTNPNNNNTVTTKTKRTRKSVPRDSPPQRSSIYRGVTRHRWTGRYEAHLWDKNCWNESQNKKGRQVYLGAYDNEEAAARAYDLAALKYWGHDTILNFPLSNYEEELVEMEGQSKEEYIGSLRRKSSGFSRGVSKYRGVARHHHNGRWEARIGRVFGNKYLYLGTYATQEEAAQAYDRAAIEYRGLNAVTNFDLSKYIKWLRPNNNQNNPKPSNPQQNPNSDDTSPIPKLNQETSSGSDTSAPPPRSGATAGGSGSASSALGLLLQSSKYKEMVEKTSTDCLSTSSEPGSSHRIFPDDIQTMFFDCQDSSSYTEG

SEQ ID NO: 851 - DNA, 795 bp, Citrus sinensis
atggcgaaaacctcaaggcaaagccaaaagaacactactacaaaccctaataacaataatacagtcacgaccaagactaagagaacaagaaaaagcgtgccccgtgactcgccgccgcaacgtagctcgatctaccgaggcgttaccaggcatcgatggacgggacgatatgaagctcatttgtgggataaaaattgctggaatgagtctcaaaacaagaaagggagacaagtatatttaggtgcttatgataatgaagaagctgcagcacgtgcctatgatttggcagcattgaaatattggggacatgatactattcttaatttcccactttcgaattatgaagaagagctcgtagaaatggagggtcagtcaaaagaggaatatattggttctttaaggagaaaaagtagtggattttctcgaggggtctccaaatatagaggcgtagcaagacaccatcacaatggcagatgggaagctcgaattggcagagtttttggcaacaaatatctctatcatggaacttatgctactcaagaagaagcagtctcagcctatgacagggcaaacatagagtatcgtggacttaatgctggccccactttgatcttatcaaatacatacagtggttacgccccattaataattaaaataacccctaacctagctaccctcaacaaaaacctaatagtgatggacacagtccaaatcctaaacctaaatcagggaacctccagcggaagtgaccctacacgacctcacacctcgtgttggggctaccgcaggaggtaa

SEQ ID NO: 852 - protein, 264 aa, Citrus sinensis
MAKTSRQSQKNTTTNPNNNNTVTTKTKRTRKSVPRDSPPQRSSIYRGVTRHRWTGRYEAHLWDKNCWNESQNKKGRQVYLGAYDNEEAAARAYDLAALKYWGHDTILNFPLSNYEEELVEMEGQSKEEYIGSLRRKSSGFSRGVSKYRGVARHHHNGRWEARIGRVFGNKYLYHGTYATQEEAVSAYDRANIEYRGLNAGPTLILSNTYSGYAPLIIKITPNLATLNKNLIVMDTVQILNLNQGTSSGSDPTRPHTSCWGYRRR

SEQ ID NO: 853 - DNA, 693 bp, Citrus sinensis
atggcgaaaacctcaaggcaaagccaaaagaacactactacaaaccctaataacaataatacagtcacgaccaagactaagagaacaagaaaaagcgtgccccgtgactcgccgccgcaacgtagctcgatctaccgaggcgttaccaggcatcgatggacgggacgatatgaagctcatttgtgggataaaaattgctggaatgagtctcaaaacaagaaagggagacaagtatatttaggtgcttatgataatgaagaagctgcagcacgtgcctatgatttggcagcattgaaatattggggacatgatactattcttaatttcccactttcgaattatgaagaagagctcgtagaaatggagggtcagtcaaaagaggaatatattggttctttaaggagaaaaagtagtggattttctcgaggggtctccaaatatagaggcgtagcaagacaccatcacaatggcagatgggaagctcgaattggcagagttttttggcacaaatatctttatcttggaacttatgctactcaagaagaagcagctccagcctatgacagggcagcaatagagtatcggggacttaatggggtcaccaccttggatcttaacaaatacattaaggggttacgccccaataaaaatcaaaataaccccaaaccctaccaaccctcaacaaaaccctaa

SEQ ID NO: 854 - protein, 230 aa, Citrus sinensis
MAKTSRQSQKNTTTNPNNNNTVTTKTKRTRKSVPRDSPPQRSSIYRGVTRHRWTGRYEAHLWDKNCWNESQNKKGRQVYLGAYDNEEAAARAYDLAALKYWGHDTILNFPLSNYEEELVEMEGQSKEEYIGSLRRKSSGFSRGVSKYRGVARHHHNGRWEARIGRVFWHKYLYLGTYATQEEAAPAYDRAAIEYRGLNGVTTLDLNKYIKGLRPNKNQNNPKPYQPSTKP

SEQ ID NO: 855 - DNA, 666 bp, Citrus sinensis
atggcgaaaacctcaaggcaaagccaaaagaacactactacaaaccctaataacaataatacagtcacgaccaagactaagagaacaagaaaaagcgtgccccgtgactcgccgccgcaacgtagctcgatctaccgaggcgttaccaggcatcgatggacgggacgatatgaagctcatttgtgggataaaaattgctggaatgagtctcaaaacaagaaagggagacaagtatatttaggtgcttatgataatgaagaagctgcagcacgtgcctatgatttggcagcattgaaatattggggacatgatactattcttaatttcccactttcgaattatgaagaagagctcgtagaaatggagggtcagtcaaaagaggaatatattggttctttaaggagaaaaagtagtggattttctcgaggggtctccaaatatagaggcgtagcaagacaccatcacaatggcagatgggaagctcgaattggcagagtttttggcaacaaatatctctatcttggaacttatgctactcaagaagaagcagctcaagcctatgacagggcagcaatagagtatcgtggacttaatgctgtcaccaactttgatcttagcaaatacattaagtggttacgcccaaataataatcaaaataacccctaa

SEQ ID NO: 856 - protein, 221 aa, Citrus sinensis
MAKTSRQSQKNTTTNPNNNNTVTTKTKRTRKSVPRDSPPQRSSIYRGVTRHRWTGRYEAHLWDKNCWNESQNKKGRQVYLGAYDNEEAAARAYDLAALKYWGHDTILNFPLSNYEEELVEMEGQSKEEYIGSLRRKSSGFSRGVSKYRGVARHHHNGRWEARIGRVFGNKYLYLGTYATQEEAAQAYDRAAIEYRGLNAVTNFDLSKYIKWLRPNNNQNNP

SEQ ID NO: 857 - DNA, 699 bp, Gossypium hirsutum
atgacgaaactatcacaggtgaaccacaaaaacagtgcacaaagtggtagtgttaataacaatatttctacaagtaatgatgttactaaggtgaagaagagaactaggagaagttttccaagagattcaccaccacaacgtagctctatttatcgaggggtcactaggcataggtggacaggtcgatatgaagctcacctgtgggacaagaattgctggaatgaatcacaaaacaagaaaggacgccaagtctatcttggtgcttatgatgatgaagaatctgcagcacatgcttatgatttagcagcactcaaatactggggtcaagataccattcttaactttccggtatcaacataccagaaggaattaaaagaaatggagaatcaatctagagaagagtatattggatcattgagaaggaaatctagtggcttctctcgcggagtttctaaatatagaggtgttgctagacatcaccataatggaagatgggaagctcgcattggcagagttttcggcaacaaatacctctatcttgggacatacgctacacaagaagaagctgccacagcatatgatatggctgctatagagtatcgaggattaaacgctgtgaccaacttcgatttaagtcgttatatcaaatggctaaagccaaacccaaacccaaccctaccacccctaactctaatatag

SEQ ID NO: 858 - protein, 232 aa, Gossypium hirsutum
MTKLSQVNHKNSAQSGSVNNNISTSNDVTKVKKRTRRSFPRDSPPQRSSIYRGVTRHRWTGRYEAHLWDKNCWNESQNKKGRQVYLGAYDDEESAAHAYDLAALKYWGQDTILNFPVSTYQKELKEMENQSREEYIGSLRRKSSGFSRGVSKYRGVARHHHNGRWEARIGRVFGNKYLYLGTYATQEEAATAYDMAAIEYRGLNAVTNFDLSRYIKWLKPNPNPTLPPLTLI

SEQ ID NO: 859 - DNA, 864 bp, Glycine max
atggcgaagaaatcacagaaaagcctcaacagcactgggaagcgcacacgcaaaagcgtcccaagagactcacctccacaacgaagttcaatctataggggtgtcacaaggcatcgatggactggtcgatatgaggctcatttgtgggataagaattgctggaatgaatcacagagcaagaaaggaagacaaggggcatatgatgatgaagaagccgcagcacgtgcctatgacttggcagcattgaagtactggggccaagataccattctcaattttccattatcaaattatgaggaaaagctcaaggagatggagggccagtcaaaagaagaatatattggatccttgagaagaaaaagcagtggattctctcgaggagtttcaaaatacagaggcgtagcaagacaccaccataacggaagatgggaagctcgaattggaagggtctttggcaacaaatatctataccttggaacttacgctacacaagaagaagcagccgcagcatatgacatggcagcaatagaatacagaggacttaacgcggttacaaactttgacctgagccgttatatcaattggccacgtcctaaaacagaagaaaatcatcaaactattcctagcaatgaaaatgtaaactctaatgctgaacttgagctaggttcggctagtgatgagatcacagaagagggtgtagcaccatcttcagaatcaaatccttctcgtcgcacattccctgaagacattcaaacaatttttgaaaatcaagattcaggcatctacactgaaaatgatgatatcatttttggtgacctgggctcctttggtgcaccaatttttcattacgagcttgatgtttag

SEQ ID NO: 860 - protein, 287 aa, Glycine max
MAKKSQKSLNSTGKRTRKSVPRDSPPQRSSIYRGVTRHRWTGRYEAHLWDKNCWNESQSKKGRQGAYDDEEAAARAYDLAALKYWGQDTILNFPLSNYEEKLKEMEGQSKEEYIGSLRRKSSGFSRGVSKYRGVARHHHNGRWEARIGRVFGNKYLYLGTYATQEEAAAAYDMAAIEYRGLNAVTNFDLSRYINWPRPKTEENHQTIPSNENVNSNAELELGSASDEITEEGVAPSSESNPSRRTFPEDIQTIFENQDSGIYTENDDIIFGDLGSFGAPIFHYELDV

SEQ ID NO: 861 - DNA, 1053 bp, Glycine max
atggccaaaaaatcacagctgcgtacccagaaaaacaatgttaccaccaatgacgataataatcttaacgtaaccaacactgtgaccaccaaggtgaaacgaacaaggagaagtgtccctagagactccccacctcaacgcagctcaatataccgaggagtcactaggcaccgatggacaggccgatacgaagctcatttgtgggacaaacattgctggaatgaatcacagaacaaaaaagggcgacaaggcgcttatgacaatgaagaggcagcagcacatgcttatgatctagcagcactgaaatactggggtcaagataccattcttaattttccgttatcaaactacctgaacgaactgaaagaaatggagggtcaatcacgggaggagtatatcggatcgctgaggaggaaaagcagtggtttttctcggggaatttctaaatacagaggtgttgcaaggcatcatcataacggaaggtgggaggctcggattggcaaagtttttggcaataaatatctttacctcggaacttatgctacccaagaagaagctgctactgcctatgacctggcagccatagaataccgtggactcaatgctgtcaccaatttcgatctcagccgttacattaatattaatctcactaacataaacaataataataattgcactaacagcttcaccccaagtcctgatcaagaacaagaagctagcttcttccacaacaaagattcactcaataatactattgtagaagaagtcacgttggtgccacatcagcctcgtccagcgagtgccacgtcagcattggagcttctacttcagtcatcaaagttcaaggaaatgatggagatgacatctgtggccaatctttcatcaacacagatggaatctgagttgccacagtgcacatttcctgatcacattcagacgtactttgagtatgaagattccaatagatatgaggaaggagatgatctcatgttcaagttcaacgagttcagctccattgtgccgttttaccaatgtgacgagttcgagagttga

SEQ ID NO: 862 - protein, 350 aa, Glycine max
MAKKSQLRTQKNNVTTNDDNNLNVTNTVTTKVKRTRRSVPRDSPPQRSSIYRGVTRHRWTGRYEAHLWDKHCWNESQNKKGRQGAYDNEEAAAHAYDLAALKYWGQDTILNFPLSNYLNELKEMEGQSREEYIGSLRRKSSGFSRGISKYRGVARHHHNGRWEARIGKVFGNKYLYLGTYATQEEAATAYDLAAIEYRGLNAVTNFDLSRYININLTNINNNNNCTNSFTPSPDQEQEASFFHNKDSLNNTIVEEVTLVPHQPRPASATSALELLLQSSKFKEMMEMTSVANLSSTQMESELPQCTFPDHIQTYFEYEDSNRYEEGDDLMFKFNEFSSIVPFYQCDEFES

SEQ ID NO: 863 - DNA, 1071 bp, Medicago truncatula
atggcgaaaaaatcgcagaagcaaatagagaaagacgacaatgcaagcaatgataatgataatctgaatccaagtaacactgtcaccaccaaagcaaaacggacgaggaaaagtgtccctagaacttctccacctcaacgcagctcaatatacagaggagtcactaggcaccgttggacaggccgatatgaagctcatttgtgggacaagaattgttggaatgagtctcagaacaagaaagggagacaaggtgcttatgataatgaggagacggcagcacatgcttatgatctagcagcattgaaatattggggtcaagataccattattaattttccgctatcaaactatcagaaagaactaattgaaatggagagtcaatcaagggaggagtatattggatccttaagaaggaaaagcagtggtttttcacggggtgtatctaaatacagaggtgtagcaagacatcatcataacggaaggtgggaggcacggattggcaaagtttttggcaataagtatctttatctcggaacatatgctacccaagaagaagcagctacagcttatgacatggcagctattgaataccgtggacttaatgctgttaccaatttcgacctaagccgttatattaagtggcttaagcccaacaataacaacaatgacgacaataacaagtctaatattaatctttgtgacattaactctaacagtagtgccaacgactcaaactctaatgaagaattggaatttagcctcgtggacaatgaaatatcactcaataattctattgacgaagccacattggttcaacctcgaccaactagtgccacgtcagccctagagcttttgcttcaatcatctaagtttaaggaaatggtggaaatggcatcaatgacttccaatgtgtcaacgacgttggagtctgatcaattgtcacaatgtgcatttcctgatgacattcaaacgtactttgaatatgaaaatttcaatgatacaatgttggaagacctcaactccattatgcctacgtttcattatgactttgagggtgctgaggttttatag

SEQ ID NO: 864 - protein, 356 aa, Medicago truncatula
MAKKSQKQIEKDDNASNDNDNLNPSNTVTTKAKRTRKSVPRTSPPQRSSIYRGVTRHRWTGRYEAHLWDKNCWNESQNKKGRQGAYDNEETAAHAYDLAALKYWGQDTIINFPLSNYQKELIEMESQSREEYIGSLRRKSSGFSRGVSKYRGVARHHHNGRWEARIGKVFGNKYLYLGTYATQEEAATAYDMAAIEYRGLNAVTNFDLSRYIKWLKPNNNNNDDNNKSNINLCDINSNSSANDSNSNEELEFSLVDNEISLNNSIDEATLVQPRPTSATSALELLLQSSKFKEMVEMASMTSNVSTTLESDQLSQCAFPDDIQTYFEYENFNDTMLEDLNSIMPTFHYDFEGAEVL

SEQ ID NO: 865 - DNA, 978 bp, Ocimum basilicum
atggggagatcttgtaagcaaaagaagacaagtaatagtaataacgccgtcgacgtgggcgtaaataagagtacaaggactagaaagagcattcccagagaatctccgccgcagcgtagctccgtttacagaggtgtcactaggcaccgctggactggacgatacgaagctcacttgtgggataaaaactgctggaatgagacccaaaacaagaaagggaggcaagtgtatttaggggcctacgatgacgaagaagcagctgcacatgcatatgacttggctgcattgaagtattggggacaagatacagtccttaattttccactctcgacttatcaaaaacaactcgaggaaatggaaggtcaatcaaaggaagagtacatcagatcattgagaaggaaaagcagtggattttctcgtggtgtatcaaaatatcgaggcgtggcaagacaccatcataatggaagatgggaggcacgaattgggagagtcttcggcaataaatatctctaccttgggactttcgctacacaagaagaagcagcaactgcatacgacatggcagcgatcgagtatcgcggacttaacgccgttaccaattttgacctcagccgttacatcaagtgcttccctcctctccagaacaagtcgaaaaaccctaaaccgatcgctaacggcgtcaaagaatctaactccatgcaaaaccctaatcaagacataaatgaaggggaagtcactagccctactcaaactgccacgttggaggcttcggatgccacctcatcaaccctagggattctgttgcaaccttcaagtaagaacacgagtagtcctccaaggagcagtttccccgatgatattcaaacatcgttcgagattcgagattcgagcaactttgaagaggagcatgggattgtgtttggagagtatgattcattcgcctcgccaatgttccaatatgagctcgaaaccaattag

SEQ ID NO: 866 - protein, 325 aa, Ocimum basilicum
MGRSCKQKKTSNSNNAVDVGVNKSTRTRKSIPRESPPQRSSVYRGVTRHRWTGRYEAHLWDKNCWNETQNKKGRQVYLGAYDDEEAAAHAYDLAALKYWGQDTVLNFPLSTYQKQLEEMEGQSKEEYIRSLRRKSSGFSRGVSKYRGVARHHHNGRWEARIGRVFGNKYLYLGTFATQEEAATAYDMAAIEYRGLNAVTNFDLSRYIKCFPPLQNKSKNPKPIANGVKESNSMQNPNQDINEGEVTSPTQTATLEASDATSSTLGILLQPSSKNTSSPPRSSFPDDIQTSFEIRDSSNFEEEHGIVFGEYDSFASPMFQYELETN

SEQ ID NO: 867 - DNA, 1260 bp, Oryza sativa
atggccaagcgacgcagcaacggcgagaccgccgccgcgagcagcgacgactctagctccggcgtctgcggcggcggcggcggcggtgaggttgagccgaggcggcggcagaagcggccgcggaggagcgccccgcgggattgcccctcccagcgcagctccgcgttccgcggcgtcacacggcaccggtggacggggcggttcgaggcgcatctctgggacaagaacacctggaacgagtcgcagagcaagaagggcagacaagtttacctcggggcttacgacggcgaggaagcggcggcgcgcgcctacgacctcgccgcattgaagtactggggccacgacaccgtcctcaacttccctctgtcaacatatgacgaggaattgaaggaaatggaggggcagtccagggaagagtacatcggatcgctccggaggaagagcagtggcttctcaagaggggtgtccaagtacagaggagttgcaaggcatcatcacaacggcaaatgggaggctcggattgggcgtgtgttcggcaacaaatacctctacctaggtacttatgcaacacaagaggaggcggccgtggcgtacgacatcgcggcgatcgagcaccgcggcctcaacgccgtcaccaacttcgacatcaatctctacatcaggtggtaccacggctcttgccgctccagcagcgccgccgccgccaccaccatcgaagacgatgatttcgccgaagccatcgccgccgcgttgcaaggcgtcgacgagcagccgtcgtcgtcgccggcgacgacgcgccagctgcaaaccgcggacgacgacgacgacgacctcgtggcgcagctcccgccccagctgaggccgctggctcgcgcggcgtccacctccccgatcggactgctgctgcggtcgcccaagttcaaggagatcatcgagcaggcggcggccgcggcggcgtcgtcctctggtagcagcagtagcagcagcacagactcaccttcttcttcgtcgtcgtcatcgctgtcgccgtcgccattgccatcgccgccgccgcagcagcagccaaccgtaccgaaggacgaccagtacaacgtcgacatgtcgtcggtggcggcggcgaggtgcagcttcccggacgacgtgcagacgtacttcgggctggacgacgacggcttcgggtacccggaggtggacacgttcttgttcggggatttgggcgcgtacgcggcgcccatgtttcagttcgagctcgacgtctga

SEQ ID NO: 868 - protein, 419 aa, Oryza sativa
MAKRRSNGETAAASSDDSSSGVCGGGGGGEVEPRRRQKRPRRSAPRDCPSQRSSAFRGVTRHRWTGRFEAHLWDKNTWNESQSKKGRQVYLGAYDGEEAAARAYDLAALKYWGHDTVLNFPLSTYDEELKEMEGQSREEYIGSLRRKSSGFSRGVSKYRGVARHHHNGKWEARIGRVFGNKYLYLGTYATQEEAAVAYDIAAIEHRGLNAVTNFDINLYIRWYHGSCRSSSAAAATTIEDDDFAEAIAAALQGVDEQPSSSPATTRQLQTADDDDDDLVAQLPPQLRPLARAASTSPIGLLLRSPKFKEIIEQAAAAAASSSGSSSSSSTDSPSSSSSSSLSPSPLPSPPPQQQPTVPKDDQYNVDMSSVAAARCSFPDDVQTYFGLDDDGFGYPEVDTFLFGDLGAYAAPMFQFELDV

SEQ ID NO: 869 - DNA, 1140 bp, Oryza sativa
atggcgaagcctcgcaagaactccaccactaccaacaccagcagcagcggtgtcgccgccgccgccgccgcggcggcggtgaagccgaagcgcacgcggaagagcgtcccccgcgagtccccctcccagcgcagctccgtctaccgcggcgtcacccggcaccggtggacggggcggttcgaggcgcacctgtgggacaagaacagctggaacgagtcccagaacaagaagggcaagcaagtttacctcggggcgtatgacgacgaggaggcagcggcgagggcgtacgatctggcggcattgaagtactggggacccgacaccatcctcaacttcccgttgtctgcatatgaaggtgagttgaaagaaatggaggggcaatcaagggaagagtatattggatccctaaggaggaaaagcagtgggttctcaagaggagtatcgaagtaccgaggcgttgcaagacaccatcacaatgggagatgggaggcccggattggccgtgtttttggcaacaagtacctctatctcggtacttacgcgacgcaggaggaggcggcaatggcgtacgacatggcggccatcgagtatcggggcctgaacgccgtcaccaacttcgacctcagccggtacatcaagtggctccggcccggcgccgacggcgcgggcgctccccagaatcctcaccccatgctgggtgctctgtcggcgcaggatctcccggcgatcgacctcgacgccatggcgtcgtcgttccagcacgacggccatggcgccgcggcggcggcggcacagctgatcccggcaagacattcgctcggccacacgccgacaacgtcggcgctcagcctgctgctgcagtcgcccaagttcaaggagatgatcgagcggacgtcggcggcggagaccaccaccaccagcagcacaaccacctcctcctcgtccccgtcgccgccgcaggcgaccaaggacgacggcgcctcgccgcagtgcagcttcccggaggacatccagacctacttcggctgcgccgccgaggacggcgccgccggcgcgggatacgccgacgtggacggcctgttcttcggcgacctcgccgcgtacgcgtcgccggcgttccacttcgagctggacttgtga

SEQ ID NO: 870 - protein, 379 aa, Oryza sativa
MAKPRKNSTTTNTSSSGVAAAAAAAAVKPKRTRKSVPRESPSQRSSVYRGVTRHRWTGRFEAHLWDKNSWNESQNKKGKQVYLGAYDDEEAAARAYDLAALKYWGPDTILNFPLSAYEGELKEMEGQSREEYIGSLRRKSSGFSRGVSKYRGVARHHHNGRWEARIGRVFGNKYLYLGTYATQEEAAMAYDMAAIEYRGLNAVTNFDLSRYIKWLRPGADGAGAPQNPHPMLGALSAQDLPAIDLDAMASSFQHDGHGAAAAAAQLIPARHSLGHTPTTSALSLLLQSPKFKEMIERTSAAETTTTSSTTTSSSSPSPPQATKDDGASPQCSFPEDIQTYFGCAAEDGAAGAGYADVDGLFFGDLAAYASPAFHFELDL

SEQ ID NO: 871 - DNA, 828 bp, Populus trichocarpa
atgggaaaaacatcaaagcaaagcctaaagaactctgcaaacactagcattaatcccgcaaccaaggtgaagcggactagaaagagtgttcctcgagactctcctcctcaacgcagctccatctatagaggcgttacaaggcatcgatggaccggacgttatgaggctcatttgtgggataagaactgctggaatgagtcacagaacaagaaaggaagacaaggggcctacgatgacgaagaagcggctgggcatgcctatgacttggcagcattaaagtactggggacaggatactatcctcaattttcctctgtcaacttacgaagaagaattcaaagagatggagggtcattcgaaagaagaatatattggatcactgaggagaaaaagtagtgggttttcacgcggtgtgtccaaatatagaggtgtagccagacaccatcataatggaagatgggaagctcgaattggcagagttttcggcaacaagtacctctaccttggaacatatgccactcaagaagaagcagcaacagcatatgacatggcagctatagagtaccgtggacttaatgctgtgacaaactttgacctaagccgctactcctcaaagttcaaggaaatgttggagagaacatcagcttctgattgccctttgacaccacccgaatccgaccgcgatccgcctcgtaggagcttcccagatgacatccaaacttacttcgattgccaagactccagtagctacactgatggtgatgacattatttttggagacctacattcatttgcttcaccgatttttcattgcgaattggatgggtag

SEQ ID NO: 872 - protein, 275 aa, Populus trichocarpa
MGKTSKQSLKNSANTSINPATKVKRTRKSVPRDSPPQRSSIYRGVTRHRWTGRYEAHLWDKNCWNESQNKKGRQGAYDDEEAAGHAYDLAALKYWGQDTILNFPLSTYEEEFKEMEGHSKEEYIGSLRRKSSGFSRGVSKYRGVARHHHNGRWEARIGRVFGNKYLYLGTYATQEEAATAYDMAAIEYRGLNAVTNFDLSRYSSKFKEMLERTSASDCPLTPPESDRDPPRRSFPDDIQTYFDCQDSSSYTDGDDIIFGDLHSFASPIFHCELDG

SEQ ID NO: 873 - DNA, 726 bp, Ricinus communis
atggcgaagatctcacaacaaaggcaaaggaacaacagcaataacactaatactagtgcaaaaactggcaccaacccttcttcaaccaaggctaaacgaactagaaaaactgtccctagagactctcctcctcaacgtagctccatttacaggggtgttacaaggcatcgatggaccggacggtatgaggctcatttgtgggacaagaattgctggaatgaatcacaaaacaagaaaggaagacaagtatatctaggtgcatatgatgatgaagaagctgctgcacatgcctatgacttggcagcattaaagtactgggggcaagataccatccttaatttcccattgtcaacttatgaagaggagctcaaagagatggagggtcaatcaaaagaagagtatattggatccttgaggaggaagagcagtggtttctctcgtggggtgtccaaatatagaggtgttgcaagacaccatcataatggaagatgggaggctcgaattggaagagtttttggtaacaaatacctctaccttggaacatacgccactcaagaggaggcagctacagcttatgacatggcagctatagagtaccgtggacttaatgccgttacaaattttgaccttagccgttacatcaaatggctccgtcctaataaccctcaagaaaaccctacttctgatgctaatcctatgccaaccctactcaagatcttggattaa

SEQ ID NO: 874 - protein, 241 aa, Ricinus communis
MAKISQQRQRNNSNNTNTSAKTGTNPSSTKAKRTRKTVPRDSPPQRSSIYRGVTRHRWTGRYEAHLWDKNCWNESQNKKGRQVYLGAYDDEEAAAHAYDLAALKYWGQDTILNFPLSTYEEELKEMEGQSKEEYIGSLRRKSSGFSRGVSKYRGVARHHHNGRWEARIGRVFGNKYLYLGTYATQEEAATAYDMAAIEYRGLNAVTNFDLSRYIKWLRPNNPQENPTSDANPMPTLLKILD

SEQ ID NO: 875 - DNA, 1059 bp, Ricinus communis
atggcgaagatctcacaacaaaggcaaaggaacaacagcaataacactaatactagtgcaaaaactggcaccaacccttcttcaaccaaggctaaacgaactagaaaaactgtccctagagactctcctcctcaacgtagctccatttacaggggtgttacaaggcatcgatggaccggacggtatgaggctcatttgtgggacaagaattgctggaatgaatcacaaaacaagaaaggaagacaagtatatctaggtgcatatgatgatgaagaagctgctgcacatgcctatgacttggcagcattaaagtactgggggcaagataccatccttaatttcccattgtcaacttatgaagaggagctcaaagagatggagggtcaatcaaaagaagagtatattggatccttgaggaggaagagcagtggtttctctcgtggggtgtccaaatatagaggtgttgcaagacaccatcataatggaagatgggaggctcgaattggaagagtttttggtaacaaatacctctaccttggaacatacgccactcaagaggaggcagctacagcttatgacatggcagctatagagtaccgtggacttaatgccgttacaaattttgaccttagccgttacatcaaatggctccgtcctaataaccctcaagaaaaccctacttctgatgctaatcctatgccaaaccctactcaagatcttggattaactttcacagcccaccaccaaagctcaaccgccacagcggaaaccaccatgcctctgccaacatgtggtggcggaggcggtggctcggcttcatctgcattagggcttttgttgcagtcaacgaagttcaaggaaatgctagaaagaacatcagccaatgattgccctatgacaccacccgagtctgaaccgcctcgtcggagcttcccggatgacattcagactttcttcgattgtcaagacactggcagcttcacggagggtgatgacataatatttggagaactagatgcatttgcttcacctatttttcattgtgaacttaatgattag

SEQ ID NO: 876 - protein, 352 aa, Ricinus communis
MAKISQQRQRNNSNNTNTSAKTGTNPSSTKAKRTRKTVPRDSPPQRSSIYRGVTRHRWTGRYEAHLWDKNCWNESQNKKGRQVYLGAYDDEEAAAHAYDLAALKYWGQDTILNFPLSTYEEELKEMEGQSKEEYIGSLRRKSSGFSRGVSKYRGVARHHHNGRWEARIGRVFGNKYLYLGTYATQEEAATAYDMAAIEYRGLNAVTNFDLSRYIKWLRPNNPQENPTSDANPMPNPTQDLGLTFTAHHQSSTATAETTMPLPTCGGGGGGSASSALGLLLQSTKFKEMLERTSANDCPMTPPESEPPRRSFPDDIQTFFDCQDTGSFTEGDDIIFGELDAFASPIFHCELND

SEQ ID NO: 877 - DNA, 1197 bp, Sorghum bicolor
atggcgaagcctcgcaagaacagcgccgccgccaacaacaacaacagcagcagcaacggcgccggcgacctgacgccgcgcgcgaagccgaagcgcacgcggaagagcgtgccccgggagtcccccacgcagcgcagctccgtctaccgcggcgtcacacggcaccggtggacggggaggttcgaggctcacctgtgggacaagaacagctggaacgagtcccagaacaagaagggcaagcaagtttacctcggcgcgtacgacgacgaggaggcagcggcgcgggcgtatgacttggcggcattgaagtactggggccccgacaccatcctcaacttcccggcgtctgcatatgaaggagagatgaaaggaatggagggccagtccagggaagagtatattggatccttgaggaggaaaagcagtgggttctccagaggtgtctccaaataccgaggtgtcgcgagacatcaccacaacgggagatgggaggcgaggatcggtcgtgttttcggaaacaagtatctctacctcgggacttacgcgacgcaggaggaggcggcgatggcgtacgacatggcggcgatcgagtaccgtggcctgaacgccgtcacaaacttcgacctcagccgctacatcaagtggctccgcccgggcgccggcgggatggcagccgcggcggcggcggcgcagaacccgcacccgatgctgggcggcctggcgcagcagctgctgctgccgccgccggcggacaccaccaccaccgacggcgccggcgccgcggcgttccagcacgaccaccacggcgccgaggcgttcccgctgccgcccaggacgtcgctgggccacacgcccacgacgtcggcgctcagcctgctgctgcagtcgcccaagttcaaggagatgatccagcggaccgagagcggcaccaccaccactaccaccacgacatcgtcgttgtcctcgtcgccgccgcccacgccgtccccgtccccgccgcggcggtcgccagcgccgacgcagccgccggtgcaggcggcggccagggacgcctcgccgcaccagcgcggcttccccgaggacgtacagacattcttcggctgcgaggacaccgcgggcatcgacgtggaagccctcttctttggcgacctcgccgcgtacgcgacgccggcgttccacttcgagatggacttgtag

SEQ ID NO: 878 - protein, 398 aa, Sorghum bicolor
MAKPRKNSAAANNNNSSSNGAGDLTPRAKPKRTRKSVPRESPTQRSSVYRGVTRHRWTGRFEAHLWDKNSWNESQNKKGKQVYLGAYDDEEAAARAYDLAALKYWGPDTILNFPASAYEGEMKGMEGQSREEYIGSLRRKSSGFSRGVSKYRGVARHHHNGRWEARIGRVFGNKYLYLGTYATQEEAAMAYDMAAIEYRGLNAVTNFDLSRYIKWLRPGAGGMAAAAAAAQNPHPMLGGLAQQLLLPPPADTTTTDGAGAAAFQHDHHGAEAFPLPPRTSLGHTPTTSALSLLLQSPKFKEMIQRTESGTTTTTTTTSSLSSSPPPTPSPSPPRRSPAPTQPPVQAAARDASPHQRGFPEDVQTFFGCEDTAGIDVEALFFGDLAAYATPAFHFEMDL

SEQ ID NO: 879 - DNA, 1089 bp, Solanum tuberosum
atggcgaaaacatcaaaatcgaatactactgcaacttcatcatcttcttcatctagcaacaaatgtgatagtaaagcgaaacgtagcaacaaaattgatagcaatgctattggtaaagtgaaacgaacgcgaaagagcgttcctagagactctcctcctcaacgtagctcaatttacagaggagttactcggcaccgatggaccggccgatacgaagctcatctatgggataaaaattgctggaatgaaacacagaacaaaaaaggaagacaagtttatttgggagcctatgatgatgaagaagcagctgcacatgcatatgacttagcggcgttaaagtattggggtcaagacaccgtccttaatttccctgtagctacgtatgaaaatgagctaaaggaaatggaaggtcaatcaaaagaagagtatattggttctttgagaagaaaaagtagtgggttttcaaggggagtatcaaaatatagaggtgtagcaagacaccaccacaatggaagatgggaggctcgaattggaagggtatttggcaataaatatctctaccttggaacatatgctactcaagaggaagcagcaaccgcatatgatatggcagctattgaataccgtggactaaacgccgttacaaattttgaccttagccgttacattaaatggctacgtccctccgaccaaacaaatgataataccattaataaccctgaaccaaaccctaaccctattgacattcatctcatgcctacaaatttaacccaacaacaaagctccggctgcgatgtaactgttgcggctccgccacctggatgtggcggagccgcgacttcatcagcagcactagaacttttgatgcagtctacaaagttcaaggaaatgctcgaaagaacatcggaggtaattgaatgcccggaaactccaccggagccagaccgaccacggaggagcttccctgatgatatacaaacctattttgattgccaagaatcaagtagcttcattgaggagcatgatattatttttggtgacttggattctttaacattgccaatgtttcagtgtgagcttattaattaa

SEQ ID NO: 880 - protein, 362 aa, Solanum tuberosum
MAKTSKSNTTATSSSSSSSNKCDSKAKRSNKIDSNAIGKVKRTRKSVPRDSPPQRSSIYRGVTRHRWTGRYEAHLWDKNCWNETQNKKGRQVYLGAYDDEEAAAHAYDLAALKYWGQDTVLNFPVATYENELKEMEGQSKEEYIGSLRRKSSGFSRGVSKYRGVARHHHNGRWEARIGRVFGNKYLYLGTYATQEEAATAYDMAAIEYRGLNAVTNFDLSRYIKWLRPSDQTNDNTINNPEPNPNPIDIHLMPTNLTQQQSSGCDVTVAAPPPGCGGAATSSAALELLMQSTKFKEMLERTSEVIECPETPPEPDRPRRSFPDDIQTYFDCQESSSFIEEHDIIFGDLDSLTLPMFQCELIN

SEQ ID NO: 881 - DNA, 1068 bp, Triphysaria sp.
atggccaaatcttcagaacaaaataatagcttggccaccagcacagcggccgaggctcccgttgttattaaaaaggcgaaacgaacacgaaaaagcattccaagagagtctccaagacgacgtagctcaatcttcaggggtgtcacaaggcaccgatggacgggtcgttatgaagctcatctgtgggataagaatagctggaatgagtcacaaagcaagaaaggaagacaagtgtatttaggagcgtatgatgaggaagaagcggctgcacgtgcttatgacttggcagcattgaagtactggggacaggacacaatcctaaatttcccactatccagctatgaagaggagcttaatgaaatggagggtcagtcaaaggaagagtatattggttcattaagaggaaaaagcagtggcttttctcgtggagtatcaaaatacagaggcgtggtaaggcatcatcataatggtagatgggaagctcggattggcagggtttttggcaacaaatacctctaccttggaacatatgcaactcaagaagaagcggcgagggcatacgacatggccgccgttaagtaccgcggacataatgcggtaaccaatttcgacctcagtcgttatgccgagtggctcgggcctcttagccacaactccgacaaccctcagctaacccctaggggtaatatggacattaataacacatttcaagatgcaagtcaagaaattgggttgacttttctcggtcaacagcccgaaagtccaatcttggctgattccacctccccttcgccaccacatcttagtgacggcgccaccgcttcttcagccctaggcgttttgctaaactcctatatgtttaaggaaatgatggaccaaagggtggtagcgagcccatctagcccgtccgagcctgagcccaagcccggacctcaacgaagcagtttcccagatgatatacaaacatcttttgagtttcaagattcatttgtggaggaacatgacgtcatctttggtaactatgattcatttgtgtcgtcagcgttccaatgtgggcttgacgcttga

SEQ ID NO: 882 - protein, 355 aa, Triphysaria sp.
MAKSSEQNNSLATSTAAEAPVVIKKAKRTRKSIPRESPRRRSSIFRGVTRHRWTGRYEAHLWDKNSWNESQSKKGRQVYLGAYDEEEAAARAYDLAALKYWGQDTILNFPLSSYEEELNEMEGQSKEEYIGSLRGKSSGFSRGVSKYRGVVRHHHNGRWEARIGRVFGNKYLYLGTYATQEEAARAYDMAAVKYRGHNAVTNFDLSRYAEWLGPLSHNSDNPQLTPRGNMDINNTFQDASQEIGLTFLGQQPESPILADSTSPSPPHLSDGATASSALGVLLNSYMFKEMMDQRVVASPSSPSEPEPKPGPQRSSFPDDIQTSFEFQDSFVEEHDVIFGNYDSFVSSAFQCGLDA

SEQ ID NO: 883 - DNA, 1053 bp, Vitis vinifera
atggcgaagctatcacagcaaaaccataagaatagtgcaaacagcaatgctactaatactactctctctgtgacaaaggtgaagcggactcgcaaaactgtccccagagactctcctcctcagcggagctcgatatatcggggcgtcacgaggcatcggtggactggccgatacgaggctcatttgtgggataagaactgctggaatgaatcacagaacaagaaaggaagacaagtttatctcggtgcctaccatgatgaagaagccgcagcacatgcttatgacttggcagctctcaaatactggggtccagaaaccattctcaattttccgctatcaacatatgaaaaggagttgaaggaaatggagggtctgtcaagagaagaatacattggatccttgagaagaagaagcagcggtttttctcgaggtgtttcaaaatatagaggggttgcaagacatcatcacaatggcagatgggaagcgcggattggcagagtgttcggcaacaaatacctctatcttggcacatatgctactcaggaggaggcagcgactgcatatgatatggctgccatagagtatcgcggtcttaacgcggttaccaactttgatctcagtcgctacatcaaatggttaaagcctaatcaaaataacccatgcgaacagcccaataaccctaaccttgactctaatttgactccaaaccctaatcatgattttggaatcagcttcctgaatcacccacagacttctggtactgctgcctgcagtgaacctccattgactcagaccaggcctcccattgcctcatcggcgcttggccttctacttcagtcctcaaagttcaaagagatgatggagatgacaactgccgccgaccacctatcgacaccgcctgagtctgagctgccacggtgcagcttccctgacgacattcagacgtacttcgagtgccaggattccggcagttacgaggaaggagacgatgttatcttcagtgagctcaactcgttcatacctcccatgttccaatgtgatttcagtgcttaa

SEQ ID NO: 884 - protein, 350 aa, Vitis vinifera
MAKLSQQNHKNSANSNATNTTLSVTKVKRTRKTVPRDSPPQRSSIYRGVTRHRWTGRYEAHLWDKNCWNESQNKKGRQVYLGAYHDEEAAAHAYDLAALKYWGPETILNFPLSTYEKELKEMEGLSREEYIGSLRRRSSGFSRGVSKYRGVARHHHNGRWEARIGRVFGNKYLYLGTYATQEEAATAYDMAAIEYRGLNAVTNFDLSRYIKWLKPNQNNPCEQPNNPNLDSNLTPNPNHDFGISFLNHPQTSGTAACSEPPLTQTRPPIASSALGLLLQSSKFKEMMEMTTAADHLSTPPESELPRCSFPDDIQTYFECQDSGSYEEGDDVIFSELNSFIPPMFQCDFSA

SEQ ID NO: 885 - DNA, 1191 bp, Zea mays
atggcgaggcctcgcaagaacagcgccgccgccgccaacaacaacaacagcaacaccaccaacgccggcaacgccgccgtcgacctcgcggcgcgcgtcaagccgaagcgcacgcggaagagcgtgccccgggagtccccctcgcagcgcagctccgtctaccgcggcgtcacacggcaccggtggacggggaggttcgaggctcacctgtgggacaagaacagctggaacgagtcccagaacaagaagggcaagcaagtttacctcggcgcgtacgacgacgaggacgcagcggcgcgcgcgtatgacttggcggcattgaagtactggggccccgacaccatcctcaacttcccggcgtctgcatatgaagcagagttgaaagaaatggaggggcagtccagggaagagtatattgggtccttaaggaggaaaagcagtgggttctccagaggtgtttccaaataccgaggtgtcgcaaggcatcaccacaacgggagatgggaggcgaggattggtcgcgtcttcggaaacaagtatctctacctcgggacttacgggacgcaggaggaggcggcgatggcgtacgacatggcggcgatcgagtaccggggcctgaacgccgtcactaacttcgacctcagccgctacatcaagtggctccgcccgggcgccggcgccgcgcagaacccgcacccgatgctggacggcctggcgcagcagctgctgctgtcgccggagggcaccatcgacggcgccgcgttccaccagcagcagcacgaccaccgccagcagggcgccgccgagctcccgctgccgcccagggcgtcgctgggccacacgcccaccacgtcggcgctcggcctgctgctgcagtcgtccaagttcaaggagatgatccagcgggcgtcggcggccgagagcggcaccaccaccgtcaccaccacgtcgtcgtcgtcgtcgcagccgcccacgccgacgccgacgccgtcgccatcgccacctccgacgccgccagtgcagccggccagggacgcctcgccacagtgcagcttccccgaggacatacagacctttttcggctgcgaggacgtcgcgggcgtcggcgccggcgtcgacgtggacgccctcttttttggcgacctcgccgcgtacgcgtcgccggcgttccacttcgagatggacttgtag

SEQ ID NO: 886 - protein, 396 aa, Zea mays
MARPRKNSAAAANNNNSNTTNAGNAAVDLAARVKPKRTRKSVPRESPSQRSSVYRGVTRHRWTGRFEAHLWDKNSWNESQNKKGKQVYLGAYDDEDAAARAYDLAALKYWGPDTILNFPASAYEAELKEMEGQSREEYIGSLRRKSSGFSRGVSKYRGVARHHHNGRWEARIGRVFGNKYLYLGTYGTQEEAAMAYDMAAIEYRGLNAVTNFDLSRYIKWLRPGAGAAQNPHPMLDGLAQQLLLSPEGTIDGAAFHQQQHDHRQQGAAELPLPPRASLGHTPTTSALGLLLQSSKFKEMIQRASAAESGTTTVTTTSSSSSQPPTPTPTPSPSPPPTPPVQPARDASPQCSFPEDIQTFFGCEDVAGVGAGVDVDALFFGDLAAYASPAFHFEMDL

SEQ ID NO: 887 - DNA, 52 bp, Artificial sequence
  primer 1
ggggacaagtttgtacaaaaaagcaggcttaaacaatggcgaaaaaatcgca

SEQ ID NO: 888 - DNA, 52 bp, Artificial sequence
  primer 2
ggggaccactttgtacaagaaagctgggtccatattctcttttgaattgagc

SEQ ID NO: 889 - DNA, 2194 bp, Oryza sativa; identical to SEQ ID NO: 289

SEQ ID NO: 890 - protein, 50 aa, Artificial sequence
  motif 43
  VARIANT (8)..(8): / replace = "Gly"
  VARIANT (50)..(50): / replace = "Phe"
EYIGSLRRKSSGFSRGVSKYRGVARHHHDGRWEARIGKVFGNKYLYLGTY

SEQ ID NO: 891 - protein, 50 aa, Artificial sequence
  motif 44
RKSVPRDSPPQRSSIYRGVTRHRWTGRYEAHLWDKNCWNESQNKKGRQVY

SEQ ID NO: 892 - protein, 41 aa, Artificial sequence
  motif 45
  VARIANT (3)..(3): / replace = "Asn"
  VARIANT (9)..(9): / replace = "His"
  VARIANT (21)..(21): / replace = "His"
  VARIANT (31)..(31): / replace = "Thr"
  VARIANT (37)..(37): / replace = "Val"
YDDEEAAARAYDLAALKYWGQDTILNFPLSNYEEELKEMEG

SEQ ID NO: 893 - protein, 41 aa, Artificial sequence
  motif 46
  VARIANT (8)..(8): / replace = "Gln"
  VARIANT (12)..(12): / replace = "Arg"
  VARIANT (30)..(30): / replace = "Lys"
ATQEEAATAYDMAAIEYRGLNAVTNFDLSRYIKWLRPNNNQ

SEQ ID NO: 894 - protein, 21 aa, Artificial sequence
  motif 47
  VARIANT (1)..(1): / replace = "Glu"
  VARIANT (4)..(4): / replace = "Pro"
  VARIANT (5)..(5): / replace = "Asn"
  VARIANT (6)..(6): / replace = "Thr" / replace = "Gln"
  VARIANT (7)..(7): / replace = "Thr" / replace = "Arg"
  VARIANT (8)..(8): / replace = "Thr"
  VARIANT (9)..(9): / replace = "Asn"
  VARIANT (11)..(11): / replace = "Asn"
  VARIANT (12)..(12): / replace = "Asn"
  VARIANT (13)..(13): / replace = "Asn"
  VARIANT (14)..(14): / replace = "Asn"
  VARIANT (16)..(16): / replace = "Val"
  VARIANT (17)..(17): / replace = "Thr"
  VARIANT (18)..(18): / replace = "Thr"
  VARIANT (19)..(19): / replace = "Lys"
  VARIANT (20)..(20): / replace = "Gln"
  VARIANT (21)..(21): / replace = "Lys"
QSQKPRCSFPDDIQTYFECTD

SEQ ID NO: 895 - protein, 10 aa, Artificial sequence
  motif 48
  VARIANT (3)..(3): / replace = "Pro"
  VARIANT (8)..(8): / replace = "Thr"
  VARIANT (9)..(9): / replace = "Val"
QSSKFKEMLE

SEQ ID NO: 896 - DNA, 11 bp, Artificial sequence
  GCC-box
taagagccgcc

SEQ ID NO: 897 - protein, 74 aa, Artificial sequence
  AP2 consensus domain
  UNSURE (1)..(1): Xaa can be any amino acid
  UNSURE (2)..(2): Xaa can be Phe, His, Trp or Tyr
  UNSURE (3)..(3): Xaa can be His, Lys or Arg
  UNSURE (6)..(6): Xaa can be Cys, Asp, Glu, His, Lys, Asn, Gln, Arg, Ser or Thr
  UNSURE (7)..(7): Xaa can be any amino acid
  UNSURE (8)..(8): Xaa can be His, Lys or Arg
  UNSURE (9)..(9): Xaa can be any amino acid
  UNSURE (10)..(10): Xaa can be Ala, Cys, Phe, Gly, His, Ile, Lys, Leu, Met, Arg, Thr, Val, Trp or Tyr
  UNSURE (12)..(12): Xaa can be any amino acid
  UNSURE (13)..(13): Xaa can be His, Lys or Arg
  UNSURE (15)..(15): Xaa can be any amino acid
  UNSURE (16)..(16): Xaa can be Ala, Gly or Ser
  UNSURE (17)..(17): Xaa can be Asp, Glu, His, Lys or Arg
  misc_feature (18)..(18): Xaa can be any naturally occurring amino acid
  UNSURE (19)..(19): Xaa can be Ala, Cys, Asp, Glu, Gly, His, Lys, Asn, Gln, Arg, Ser or Thr
  UNSURE (20)..(20): Xaa can be Asp, Glu, His, Lys or Arg
  UNSURE (21)..(21): Xaa can be Ala, Cys, Asp, Gly, Asn, Pro, Ser, Thr or Val
  UNSURE (22)..(31): Xaa can be any amino acid
  UNSURE (32)..(33): Xaa can be Ala, Cys, Asp, Glu, Gly, His, Lys, Asn, Gln, Arg, Ser or Thr
  UNSURE (34)..(34): Xaa can be Asp, Glu, His, Lys or Arg
  UNSURE (35)..(35): Xaa can be Ile, Leu or Val
  UNSURE (36)..(36): Xaa can be Phe, His, Trp or Tyr
  UNSURE (39)..(39): Xaa can be Ser or Thr
  UNSURE (41)..(41): Xaa can be Ala, Cys, Asp, Gly, Asn, Pro, Ser, Thr or Val
  UNSURE (42)..(42): Xaa can be Ser or Thr
  UNSURE (43)..(43): Xaa can be Ala, Cys, Asp, Glu, Gly, His, Lys, Asn, Gln, Arg, Ser or Thr
  UNSURE (44)..(44): Xaa can be Asp or Glu
  UNSURE (45)..(45): Xaa can be Ala, Cys, Asp, Glu, Gly, His, Lys, Asn, Gln, Arg, Ser or Thr
  UNSURE (48)..(48): Xaa can be Ala, Cys, Phe, Gly, His, Ile, Lys, Leu, Met, Arg, Thr, Val, Trp or Tyr
  UNSURE (52)..(52): Xaa can be any amino acid
  UNSURE (55)..(58): Xaa can be Ala, Cys, Phe, Gly, His, Ile, Lys, Leu, Met, Arg, Thr, Val, Trp or Tyr
  UNSURE (60)..(61): Xaa can be any amino acid
  UNSURE (62)..(62): Xaa can be Cys, Asp, Glu, His, Lys, Asn, Gln, Arg, Ser or Thr
  UNSURE (64)..(65): Xaa can be Ala, Cys, Phe, Gly, His, Ile, Lys, Leu, Met, Arg, Thr, Val, Trp or Tyr
  UNSURE (68)..(68): Xaa can be Ala, Cys, Asp, Gly, Asn, Pro, Ser, Thr or Val
  UNSURE (69)..(72): Xaa can be any amino acid
  UNSURE (73)..(74): Xaa can be Ala, Cys, Asp, Glu, Gly, His, Lys, Asn, Gln, Arg, Ser or Thr
XXXGVXXXXXGXXWXXXXXXXXXXXXXXXXXXXXXXLGXFXXXXXAAXAYDXAAXXXXGXXXAXXNFXXXXXXX

SEQ ID NO: 898 - protein, 206 aa, Artificial sequence
  Consensus sequence
  misc_feature (23)..(165): Xaa can be any naturally occurring amino acid
  misc_feature (177)..(189): Xaa can be any naturally occurring amino acid
IKGPWTKEEDQRVIELVQKYGPXXXXXXXXXXXXXXXXXXXXXXXXXXXXXXXXXXXXXXXXXXXXXXXXXXXXXXXXXXXXXXXXXXXXXXXXXXXXXXXXXXXXXXXXXXXXXXXXXXXXXXXXXXXXXXXXXXXXXXXXXXXXXXXXXXXXXXXXXXXXXXXKRWSLIAKHLKXXXXXXXXXXXXXGRIGKQCRERWHNHLNP

SEQ ID NO: 899 - protein, 367 aa, Homo sapiens
MEANGLGPQGFPELKNDTFLRAAWGEETDYTPVWCMRQAGRYLPEFRETRAAQDFFSTCRSPEACCELTLQPLRRFPLDAAIIFSDILVVPQALGMEVTMVPGKGPSFPEPLREEQDLERLRDPEVVASELGYVFQAITLTRQRLAGRVPLIGFAGAPWTLMTYMVEGGGSSTMAQAKRWLYQRPQASHQLLRILTDALVPYLVGQVVAGAQALQLFESHAGHLGPQLFNKFALPYIRDVAKQVKARLREAGLAPVPMIIFAKDGHFALEELAQAGYEVVGLDWTVAPKKARECVGKTVTLQGNLDPCALYASEEEIGQLVKQMLDDFGPHRYIANLGHGLYPDMDPEHVGAFVDAVHKHSRLLRQN

SEQ ID NO: 900 - protein, 837 aa, Mus musculus
MGIQGLLQFIQEASEPVNVKKYKGQAVAVDTYCWLHKGAIACAEKLAKGEPTDRYVGFCMKFVNMLLSYGVKPILIFDGCTLPSKKEVERSRRERRQSNLLKGKQLLREGKVSEARDCFARSINITHAMAHKVIKAARALGVDCLVAPYEADAQLAYLNKAGIVQAVITEDSDLLAFGCKKVILKMDQFGNGLEVDQARLGMCKQLGDVFTEEKFRYMCILSGCDYLASLRGIGLAKACKVLRLANNPDIVKVIKKIGHYLRMNITVPEDYITGFIRANNTFLYQLVFDPIQRKLVPLNAYGDDVNPETLTYAGQYVGDSVALQIALGNRDVNTFEQIDDYSPDTMPAHSRSHSWNEKAGQKPPGTNSIWHKNYCPRLEVNSVSHAPQLKEKPSTLGLKQVISTKGLNLPRKSCVLKRPRNEALAEDDLLSQYSSVSKKIKENGCGDGTSPNSSKMSKSCPDSGTAHKTDAHTPSKMRNKFATFLQRRNEESGAVVVPGTRSRFFCSSQDFDNFIPKKESGQPLNETVATGKATTSLLGALDCPDTEGHKPVDANGTHNLSSQIPGNAAVSPEDEAQSSETSKLLGAMSPPSLGTLRSCFSWSGTLREFSRTPSPSASTTLQQFRRKSDPPACLPEASAVVTDRCDSKSEMLGETSQPLHELGCSSRSQESMDSSCGLNTSSLSQPSSRDSGSEESDCNNKSLDNQGEQNSKQHLPHFSKKDGLRRNKVPGLCRSSSMDSFSTTKIKPLVPARVSGLSKKSGSMQTRKHHDVENKPGLQTKISELWKNFGFKKDSEKLPSCKKPLSPVKDNIQLTPETEDEIFNKPECVRAQRAIFH

SEQ ID NO: 901 - protein, 571 aa, Schizosaccharomyces pombe
MGIKGLLGLLKPMQKSSHVEEFSGKTLGVDGYVWLHKAVFTCAHELAFNKETDKYLKYAIHQALMLQYYGVKPLIVFDGGPLPCKASTEQKRKERRQEAFELGKKLWDEGKKSQAIMQFSRCVDVTPEMAWKLIIALREHGIESIVAPYEADAQLVYLEKENIIDGIITEDSDMLVFGAQTVLFKMDGFGNCITIRRNDIANAQDLNLRLPIEKLRHMAIFSGCDYTDGVAGMGLKTALRYLQKYPEPRAAIRAMRLDKSLKVPVSFEKEFALADLAFRHQRVYCPKDKTLVHLSPPERELSVHEDAFIGSFFDNQLAIDIAEGRSNPITKCAFDIKDSSMQSFTKTTITISKRKGISKTDISNFFMKSIPPSKRPTKSTSLIDVTNVKVQRTHLANDISSEKQSIKSANEKAYVTPKSNSLKPGFGKSLSDISNSATKNENVPFLPPRTGVSKYFKLQKNTEKEIDEQVPSQSNNTTPTSAKSDSASPQNWFSSFSYQTPNSASPPFSSLSHTLPISALAKIGHDALNRKNHASLPSRRIVYKPPSSPSTPISMNPRPKGILSLQQYKFR

SEQ ID NO: 902 - protein, 438 aa, Artificial sequence
  Consensus sequence
  misc_feature (1)..(10): Xaa can be any naturally occurring amino acid or no amino acid
  misc_feature (14)..(14): Xaa can be any naturally occurring amino acid or no amino acid
  misc_feature (18)..(19): Xaa can be any naturally occurring amino acid or no amino acid
  misc_feature (21)..(24): Xaa can be any naturally occurring amino acid or no amino acid
  misc_feature (26)..(44): Xaa can be any naturally occurring amino acid or no amino acid
  misc_feature (50)..(50): Xaa can be any naturally occurring amino acid or no amino acid
  misc_feature (127)..(127): Xaa can be any naturally occurring amino acid or no amino acid
  misc_feature (209)..(209): Xaa can be any naturally occurring amino acid or no amino acid
  misc_feature (240)..(251): Xaa can be any naturally occurring amino acid or no amino acid
  misc_feature (253)..(262): Xaa can be any naturally occurring amino acid or no amino acid
  misc_feature (264)..(308): Xaa can be any naturally occurring amino acid or no amino acid
  misc_feature (313)..(313): Xaa can be any naturally occurring amino acid or no amino acid
  misc_feature (319)..(319): Xaa can be any naturally occurring amino acid or no amino acid
  misc_feature (327)..(389): Xaa can be any naturally occurring amino acid or no amino acid
  misc_feature (400)..(402): Xaa can be any naturally occurring amino acid or no amino acid
  misc_feature (404)..(413): Xaa can be any naturally occurring amino acid or no amino acid
  misc_feature (415)..(419): Xaa can be any naturally occurring amino acid or no amino acid
  misc_feature (421)..(422): Xaa can be any naturally occurring amino acid or no amino acid
  misc_feature (424)..(425): Xaa can be any naturally occurring amino acid or no amino acid
  misc_feature (427)..(430): Xaa can be any naturally occurring amino acid or no amino acid
  misc_feature (432)..(438): Xaa can be any naturally occurring amino acid or no amino acid
XXXXXXXXXXMAKXSRQXXKXXXXNXXXXXXXXXXXXXXXXXXXTVTTKXKRTRKSVPRDSPPQRSSIYRGVTRHRWTGRYEAHLWDKNCWNESQNKKGRQVYLGAYDDEEAAARAYDLAALKYWGXDTILNFPLSNYEEELKEMEGQSKEEYIGSLRRKSSGFSRGVSKYRGVARHHHNGRWEARIGRVFGNKYLYLGTYATQEEAAXAYDMAAIEYRGLNAVTNFDLSRYIKWLRPNXXXXXXXXXXXXNXXXXXXXXXXNXXXXXXXXXXXXXXXXXXXXXXXXXXXXXXXXXXXXXXXXXXXXXSSALXLLLQSXKFKEMIEXXXXXXXXXXXXXXXXXXXXXXXXXXXXXXXXXXXXXXXXXXXXXXXXXXXXXXXXXXXXXXXSFPDDIQTYFXXXDXXXXXXXXXXEXXXXXFXXLXXFXXXXFXXXXXXX

We claim:

1. A method for enhancing a yield-related trait in a plant relative to a control plant, comprising modulating expression in a plant of a nucleic acid encoding an AS-MTT (Abiotic Stress Membrane Tethered Transcription factor) polypeptide, wherein said AS-MTT polypeptide comprises a DUF1664 domain.

2. The method of claim 1, wherein said AS-MTT polypeptide comprises one or more of the following motifs:
(i) Motif 31 of SEQ ID NO: 648;
(ii) Motif 32 of SEQ ID NO: 649; and
(iii) Motif 33 of SEQ ID NO: 650.

3. The method of claim 1, wherein said modulated expression is effected by introducing and expressing in a plant a nucleic acid encoding said AS-MTT polypeptide.

4. The method of claim 1, wherein said nucleic acid encodes any one of the proteins listed in Table A4 or is a portion of such a nucleic acid, or a nucleic acid capable of hybridizing with such a nucleic acid.

5. The method of claim 1, wherein said nucleic acid encodes an orthologue or paralogue of any of the proteins given in Table A4.

6. The method of claim 1, wherein said enhanced yield-related trait comprises increased seed yield relative to a control plant.

7. The method of claim 1, wherein said enhanced yield-related trait is obtained under non-stress conditions.

8. The method of claim 1, wherein said enhanced yield-related trait is obtained under conditions of drought stress, salt stress or nitrogen deficiency.

9. The method of claim 3, wherein said nucleic acid is operably linked to a constitutive promoter, a GOS2 promoter, or a GOS2 promoter from rice.

10. The method of claim 1, wherein said nucleic acid is of plant origin, from a dicotyledonous plant, from a plant of the genus Populus, or from a Populus trichocarpa plant.

11. A plant obtained by the method of claim 1, or a plant cell, plant part, seed, or progeny of said plant, wherein said plant, or said plant cell, plant part, seed, or progeny, comprises a recombinant nucleic acid encoding said AS-MTT polypeptide.

12. A construct comprising:
(i) a nucleic acid encoding an AS-MTT polypeptide as defined in claim 1;
(ii) one or more heterologous control sequences capable of driving expression of the nucleic acid of (i); and optionally
(iii) a transcription termination sequence.

13. The construct of claim 12, wherein one of said control sequences is a constitutive promoter, a GOS2 promoter, or a GOS2 promoter from rice.

14. A method for making a plant having increased yield, increased biomass, and/or increased seed yield relative to a control plant, comprising transforming the construct of claim 12 into a plant, plant cell or plant part.

15. A plant, plant cell or plant part comprising the construct of claim 12.

16. A method for the production of a transgenic plant having increased yield, increased biomass, and/or increased seed yield relative to a control plant, comprising:
(i) introducing and expressing in a plant a nucleic acid encoding an AS-MTT polypeptide as defined in claim 1;
(ii) cultivating the plant under conditions promoting plant growth and development; and optionally
(iii) selecting for a plant having increased yield, increased biomass, and/or increased seed yield relative to a control plant.

17. A transgenic plant having increased yield, increased biomass, and/or increased seed yield relative to a control plant, resulting from modulated expression of a nucleic acid encoding an AS-MTT polypeptide as defined in claim 1, or a transgenic plant cell derived from said transgenic plant.

18. The transgenic plant of claim 17, or a transgenic plant cell derived thereof, wherein said plant is a crop plant, a monocot, or a cereal, or wherein said plant is rice, maize, wheat, barley, millet, rye, triticale, sorghum emmer, spelt, secale, einkorn, teff, milo, or oats.

19. A harvestable part of the transgenic plant of claim 17, wherein said harvestable part comprises a recombinant nucleic acid encoding said AS-MTT polypeptide.

20. A product derived from the transgenic plant of claim 17 and/or from a harvestable part of said plant, wherein said product comprises a recombinant nucleic acid encoding said AS-MTT polypeptide.
